(19) United States
(12) Patent Application Publication
(10) Pub. No.: US 2025/0179532 A1
(43) Pub. Date: Jun. 5, 2025

(54) TARGETED INTEGRATION OF NUCLEIC ACIDS

(71) Applicant: GENENTECH, INC., South San Francisco, CA (US)

(72) Inventors: Chi Kin Domingos Ng, San Francisco, CA (US); Yongping Guo Crawford, Foster City, CA (US); Amy Shen, San Mateo, CA (US); Meixia Zhou, Foster City, CA (US); Bradley R. Snedecor, Portola Valley, CA (US); Shahram Misaghi, Oakland, CA (US); Albert Eric Gao, San Mateo, CA (US)

(73) Assignee: GENENTECH, INC., South San Francisco, CA (US)

(21) Appl. No.: 18/883,322

(22) Filed: Sep. 12, 2024

Related U.S. Application Data
(63) Continuation of application No. 16/956,942, filed on Jun. 22, 2020, now Pat. No. 12,129,480.
(60) Provisional application No. 62/711,272, filed on Jul. 27, 2018.
(60) Provisional application No. 62/609,806, filed on Dec. 22, 2017.

(51) Int. Cl. C12N 15/90; C07K 16/00

(52) U.S. Cl. CPC C12N 15/907; C07K 16/00; C12N 15/90; C07K 2317/51; C07K 2317/515; C12N 2800/30; C12N 2800/90; C12N 2840/00

(57) ABSTRACT

The presently disclosed subject matter relates to targeted integration (TI) host cells suitable for the expression of recombinant proteins, as well as methods of producing and using said TI host cells.

### CROSS REFERENCE TO RELATED APPLICATIONS

[0001] This application is a continuation of U.S. patent application Ser. No. 16/956,942, filed Jun. 22, 2020 under 35 U.S.C. § 371, as a national stage of International Application No. PCT/US2018/067070, filed on Dec. 21, 2018, which claims the benefit of U.S. Provisional Application No. 62/609,806, filed Dec. 22, 2017, and U.S. Provisional Application No. 62/711,272, filed Jul. 27, 2018, the disclosures of each of which are incorporated herein by reference in their entireties.

### TECHNICAL FIELD

[0002] The presently disclosed subject matter relates to targeted integration (TI) host cells suitable for the expression of recombinant proteins, as well as methods of producing and using said TI host cells.

### SEQUENCE LISTING

[0003] The present specification makes reference to a Sequence Listing (submitted electronically as a.xml file named “00B2061472-ST26” on Sep. 12, 2024). The 00B2061472-ST26.xml file was generated on Sep. 12, 2024 and is 7,486,024 bytes in size. The entire contents of the Sequence Listing are hereby incorporated by reference.

### BACKGROUND

[0004] Due to the rapid advancement in cell biology and immunology, there has been an increasing demand to develop novel therapeutic recombinant proteins for a variety of diseases including cancer, cardiovascular diseases and metabolic diseases. These biopharmaceutical candidates are commonly manufactured by commercial cell lines capable of expressing the proteins of interest. For example, Chinese hamster ovary (CHO) cells have been widely adapted to produce monoclonal antibodies.

[0005] The conventional strategy for developing a commercial cell line involves the random integration of a nucleotide sequence encoding the polypeptide of interest followed by selection and isolation of cell lines producing the polypeptide of interest. This approach, however, has several disadvantages. First, such integration is not only a rare event but, given the randomness as to where the nucleotide sequence integrates, these rare events can result in a variety of gene expression and cell growth phenotypes. Such variation, known as “position effect variation,” originates, at least in part, from the complex gene regulatory networks present in eukaryotic cell genomes and the accessibility of certain genomic loci for integration and gene expression. Second, random integration strategies generally do not offer control over the number of gene copies integrated into a host cell genome. In fact, gene amplification methods are often used to achieve high-producing cells. Such gene amplification, however, can lead to unwanted cell phenotypes such as unstable cell growth and/or product expression. Third, because of the integration loci heterogeneity inherent in the random integration process, it is time-consuming and labor-intensive to screen thousands of clones after transfection to isolate cell lines demonstrating a desirable level of expression of the polypeptides of interest. Even after isolating such cell lines, stable expression of the polypeptide of interest is not guaranteed and further screening may be required to obtain a stable commercial cell line. Finally, polypeptides produced from randomly integrated cell lines exhibit a high degree of sequence variance, which may be, in part, due to the mutagenicity of the selective agents used to select for a high level of expression of polypeptides of interest.

### SUMMARY OF THE INVENTION

[0006] The presently disclosed subject matter relates to targeted integration (TI) host cells suitable for the expression of recombinant proteins. The presently disclosed subject matter not only provides host cell TI sites that have high productivity, it also provides a novel method of introducing multiple sequences of interest into a single TI locus in a host cell by recombinase-mediated cassette exchange (RMCE). The advantages of the RMCE method include increased productivity and the flexibility to co-express multiple polypeptides in varying ratios from the same TI locus. For example, but not by way of limitation, the RMCE strategies disclosed herein allow for the insertion of one, two, three, four, five, six, seven, eight or more sequences (e.g., antibody heavy chain (HC) or light chain (LC) sequences) to the TI locus. With the ability to target eight or more sequences simultaneously, the two-plasmid RMCE enables modulation of HC and LC chain ratios of mAb to improve productivity, expression of complex molecules with multiple chains, and targeting of transgenes, endogenous genes or RNAi with the antibody to modify cellular pathways.

[0007] In certain embodiments, a TI host cell comprises an exogenous nucleotide sequence integrated at an integration site within a locus of the genome of the host cell, wherein the locus is at least about 90% homologous to a sequence selected from SEQ ID Nos. 1-7. In certain embodiments, the nucleotide sequence immediately 5′ of the integrated exogenous nucleotide sequence is selected from the group consisting of sequences at least about 90% homologous to nucleotides 41190-45269 of NW_006874047.1, nucleotides 63590-207911 of NW_006884592.1, nucleotides 253831-491909 of NW_006881296.1, nucleotides 69303-79768 of NW_003616412.1, nucleotides 293481-315265 of NW_003615063.1, nucleotides 2650443-2662054 of NW_006882936.1, and nucleotides 82214-97705 of NW_003615411.1. In certain embodiments, the nucleotide sequence immediately 3′ of the integrated exogenous nucleotide sequence is selected from the group consisting of sequences at least about 90% homologous to nucleotides 45270-45490 of NW_006874047.1, nucleotides 207912-792374 of NW_006884592.1, nucleotides 491910-667813 of NW_006881296.1, nucleotides 79769-100059 of NW_003616412.1, nucleotides 315266-362442 of NW_003615063.1, nucleotides 2662055-2701768 of NW_006882936.1, or nucleotides 97706-105117 of NW_003615411.1. In certain embodiments, the integrated exogenous nucleotide sequence is operably linked to a nucleotide sequence selected from the group consisting of sequences at least about 90% homologous to a sequence selected from SEQ ID Nos. 1-7.

[0008] In certain embodiments, a TI host cell comprises an exogenous nucleotide sequence integrated at an integration site within an endogenous gene selected from the group consisting of LOC107977062 (SEQ ID NO. 1), LOC100768845 (SEQ ID NO. 2), ITPR2 (SEQ ID NO. 3), ERE67000.1 (SEQ ID NO. 4), UBAP2 (SEQ ID NO. 5), MTMR2 (SEQ ID NO. 6), XP_003512331.2 (SEQ ID NO. 7), and sequences at least about 90% homologous thereto. In certain embodiments, the exogenous nucleotide sequence is integrated at an integration site operably linked to an endogenous gene selected from the group consisting of LOC107977062 (SEQ ID NO. 1), LOC100768845 (SEQ ID NO. 2), ITPR2 (SEQ ID NO. 3), ERE67000.1 (SEQ ID NO. 4), UBAP2 (SEQ ID NO. 5), MTMR2 (SEQ ID NO. 6), XP_003512331.2 (SEQ ID NO. 7), and sequences at least about 90% homologous thereto. In certain embodiments, the integrated exogenous nucleotide is flanked by a nucleotide sequence selected from the group consisting of sequences at least about 90% homologous to a sequence selected from SEQ ID Nos. 1-7. In certain embodiments, the exogenous nucleotide sequence is integrated at an integration site immediately adjacent to all or a portion of a sequence selected from the group consisting of sequences at least about 90% homologous to a sequence selected from SEQ ID Nos. 1-7.

[0009] In certain embodiments, a TI host cell is a mammalian host cell. In certain embodiments, a TI host cell is a hamster host cell, a human host cell, a rat host cell, or a mouse host cell. In certain embodiments, a TI host cell is a Chinese hamster ovary (CHO) host cell, a CHO K1 host cell, a CHO K1SV host cell, a DG44 host cell, a DUKXB-11 host cell, a CHOKIS host cell, or a CHO KIM host cell.

[0010] In certain embodiments, a TI host cell comprises an integrated exogenous nucleotide sequence, wherein the exogenous nucleotide sequence comprises one or more recombination recognition sequence (RRS). In certain embodiments, the exogenous nucleotide sequence comprises at least two RRSs. The RRS can be recognized by a recombinase, for example, a Cre recombinase, an FLP recombinase, a Bxb1 integrase, or a φC31 integrase. The RRS can be selected from the group consisting of a LoxP sequence, a LoxP L3 sequence, a LoxP 2L sequence, a LoxFas sequence, a Lox511 sequence, a Lox2272 sequence, a Lox2372 sequence, a Lox5171 sequence, a Loxm2 sequence, a Lox71 sequence, a Lox66 sequence, a FRT sequence, a Bxb1 attP sequence, a Bxb1 attB sequence, a C31 attP sequence, and a φC31 attB sequence.

[0011] In certain embodiments, the exogenous nucleotide sequence comprises a first and a second RRS, and at least one selection marker located between the first and the second RRS. In certain embodiments, the exogenous nucleotide sequence further comprises a third RRS, wherein the third RRS is located between the first and the second RRS, and the third RRS is different from the first or the second RRS. In certain embodiments, the exogenous nucleotide sequence comprises a first and a second RRS, and a first selection marker located between the first and the second RRS. In certain embodiments, the exogenous nucleotide sequence further comprises a second selection marker, and the first and the second selection markers are different. In certain embodiments, the exogenous nucleotide sequence can further comprise a third selection marker and an internal ribosome entry site (IRES), wherein the IRES is operably linked to the third selection marker. The third selection marker can be different from the first or the second selection marker. The selection markers can be selected from the group consisting of an aminoglycoside phosphotransferase (APH) (e.g., hygromycin phosphotransferase (HYG), neomycin and G418 APH), dihydrofolate reductase (DHFR), thymidine kinase (TK), glutamine synthetase (GS), asparagine synthetase, tryptophan synthetase (indole), histidinol dehydrogenase (histidinol D), and genes encoding resistance to puromycin, blasticidin, bleomycin, phleomycin, chloramphenicol, Zeocin, and mycophenolic acid. The selection markers can also be selected from the group consisting of a green fluorescent protein (GFP) marker, an enhanced GFP (eGFP) marker, a synthetic GFP marker, a yellow fluorescent protein (YFP) marker, an enhanced YFP (eYFP) marker, a cyan fluorescent protein (CFP) marker, an mPlum marker, an mCherry marker, a tdTomato marker, an mStrawberry marker, a J-red marker, a DsRed-monomer marker, an mOrange marker, an mKO marker, an mCitrine marker, a Venus marker, a YPet marker, an Emerald6 marker, a CyPet marker, an mCFPm marker, a Cerulean marker, and a T-Sapphire marker. In some embodiments, the selection marker is selected from the group consisting of a green fluorescent protein (GFP) marker, an enhanced GFP (eGFP) marker, a synthetic GFP marker.

[0012] In certain embodiments, the exogenous nucleotide sequence comprises at least one selection marker and at least one exogenous sequence of interest (SOI). In certain embodiments, the exogenous nucleotide sequence comprises a first and a second RRS, and at least one selection marker and at least one exogenous SOI located between the first and the second RRS. In certain embodiments, the exogenous nucleotide sequence comprises a first, second, and third RRS, at least one selection marker and at least one exogenous SOI located between the first and the third RRS, and at least one exogenous SOI located between the third and the second RRS. The sequence of interest can encode any polypeptide of interest, including but not limited to the examples listed herein. The SOIs can be the same or they can be different, for example the SOIs can include coding sequences to both chains of an antibody. In the case where two or more different polypeptides are expressed, the sequence of interest can include the two polypeptides at various ratios, e.g., when eight coding sequences encode two different polypeptides including, but not limited to, 1:7, 2:6, etc. The SOIs can encode a single chain antibody, an antibody light chain, an antibody heavy chain, a single-chain Fv fragment (scFv), or an Fc fusion protein.

[0013] The presently disclosed subject matter also provides methods for the targeted integration of an exogenous nucleic acid into a host cell to facilitate the expression of a polypeptide of interest. In certain embodiments, such methods comprise the targeted integration of an exogenous nucleic acid into a host cell via recombinase-mediated recombination. In certain embodiments, such methods relate to a cell comprising an exogenous nucleotide sequence integrated at a site within an endogenous gene selected from the group consisting of LOC107977062, LOC100768845, ITPR2, ERE67000.1, UBAP2, MTMR2, XP_003512331.2, and sequences least about 90% homologous thereto. In certain embodiments, such methods relate to a cell comprising an exogenous nucleotide sequence integrated within a locus of the genome of the host cell, wherein the locus comprises a nucleotide sequence that is at least about 90% homologous to a sequence selected from SEQ ID Nos. 1-7.

[0014] In certain embodiments, the present disclosure provides a method of preparing a TI host cell expressing a polypeptide of interest comprises: a) providing a TI host cell comprising an exogenous nucleotide sequence integrated at a site within a locus of the genome of the TI host cell, wherein the locus is at least about 90% homologous to a sequence selected from SEQ ID Nos. 1-7, wherein the exogenous nucleotide sequence comprises two RRSs, flanking at least one first selection marker; b) introducing into the cell provided in a) a vector comprising two RRSs matching the two RRSs on the integrated exogenous nucleotide sequence and flanking at least one exogenous SOI and at least one second selection marker; c) introducing a recombinase, wherein the recombinase recognizes the RRSs; and d) selecting for TI cells expressing the second selection marker to thereby isolate a TI host cell expressing the polypeptide of interest.

[0015] In certain embodiments, the present disclosure provides a method of preparing a TI host cell expressing a first and second polypeptide of interest (where the first and second polypeptides can be the same or different) comprises: a) providing a TI host cell comprising an exogenous nucleotide sequence integrated at a site within a locus of the genome of the host cell, wherein the locus is at least about 90% homologous to a sequence selected from SEQ ID Nos. 1-7, wherein the exogenous nucleotide sequence comprises a first and a second RRS flanking at least one first selection marker, and a third RRS located between the first and the second RRS, wherein the first, second, and third RRSs are heterospecific, i.e., the first, second, and third RRSs are not matched RRSs and therefore any two of the first, second, and third RRSs would not be amenable to recombinase-mediated recombination; b) introducing into the cell provided in a) a first vector comprising two RRSs matching the first and the third RRS on the integrated exogenous nucleotide sequence and flanking at least one first exogenous SOI and at least one second selection marker; c) introducing into the cell provided in a) a second vector comprising two RRSs matching the second and the third RRS on the integrated exogenous nucleotide sequence and flanking at least one second exogenous SOI; d) introducing one or more recombinases, wherein the one or more recombinases recognize the RRSs; and e) selecting for TI cells expressing the second selection marker to thereby isolate a TI host cell expressing the first and second polypeptides of interest.

[0016] In certain embodiments, the present disclosure provides a method for expressing a polypeptide of interest comprises: a) providing a host cell comprising at least one exogenous SOI and at least one selection marker flanked by two RRSs integrated within a locus of the genome of the host cell, wherein the locus is at least about 90% homologous to a sequence selected from SEQ ID Nos. 1-7; and b) culturing the cell in a) under conditions suitable for expressing the SOI and recovering a polypeptide of interest therefrom.

[0017] In certain embodiments, the present disclosure provides a method for expressing a polypeptide of interest comprises: a) providing a host cell comprising at least two exogenous SOIs and at least one selection marker integrated within a locus of the genome of the host cell, wherein the locus is at least about 90% homologous to a sequence selected from SEQ ID Nos. 1-7, wherein at least one exogenous SOI and one selection marker is flanked by a first and a third RRS and at least one exogenous SOI is flanked by a second and the third RRS; and b) culturing the cell in a) under conditions suitable for expressing the SOI and recovering a polypeptide of interest therefrom.

[0018] The presently disclosed subject matter also provides compositions and methods to produce polypeptides of interest via the use of TI host cells. Such compositions and methods include, but are not limited to, polynucleotides and vectors, facilitating the integration of an exogenous nucleotide sequence into a TI host cell as well as TI host cells and compositions comprising exogenous nucleotide sequences and methods of using the same. In certain embodiments, a vector can comprise nucleotide sequences at least 50% homologous to a sequence selected from SEQ ID Nos. 1-7 flanking a DNA cassette, wherein the DNA cassette comprises at least one selection marker and at least one exogenous SOI flanked by two RRSs. The vector can be selected from the group consisting of an adenovirus vector, an adeno-associated virus vector, a lentivirus vector, a retrovirus vector, an integrating phage vector, a non-viral vector, a transposon and/or transposase vector, an integrase substrate, and a plasmid.

[0019] In certain embodiments, the methods of the present disclosure comprise the targeted integration of an exogenous nucleic acid encoding a polypeptide of interest into a host cell via homologous recombination, homology-directed repair (HDR), and/or non-homologous end joining (NHEJ). In certain embodiments, such methods involve the integration of an exogenous nucleic acid encoding a polypeptide of interest into a cell at a site within an endogenous gene selected from the group consisting of LOC107977062 (SEQ ID NO. 1), LOC100768845 (SEQ ID NO. 2), ITPR2 (SEQ ID NO. 3), ERE67000.1 (SEQ ID NO. 4), UBAP2 (SEQ ID NO. 5), MTMR2 (SEQ ID NO. 6), XP_003512331.2 (SEQ ID NO. 7), and sequences at least about 90% homologous thereto. In certain embodiments, such methods involve the integration of an exogenous nucleic acid encoding a polypeptide of interest into a cell at a site within a locus of the genome of the host cell, wherein the locus comprises a nucleotide sequence that is at least about 90% homologous to a sequence selected from SEQ ID Nos. 1-7.

[0020] In certain embodiments, the present disclosure provides a method for preparing a TI host cell expressing a polypeptide of interest comprises: a) providing a host cell comprising a locus of the genome of the host cell, wherein the locus is at least about 90% homologous to a sequence selected from SEQ ID Nos. 1-7; b) introducing a vector into the host cell, wherein the vector comprises nucleotide sequences at least 50% homologous to a sequence selected from SEQ ID Nos. 1-7 flanking a DNA cassette, wherein the DNA cassette comprises at least one selection marker and at least one exogenous SOI flanked by two RRSs; and c) selecting for the selection marker to isolate a TI host cell with the SOI integrated in the locus of the genome, and expressing the polypeptide of interest. In certain embodiments, such methods involve the use of an exogenous nuclease to promote the targeted integration. The exogenous nuclease can be selected from the group consisting of a zinc finger nuclease (ZFN), a ZFN dimer, a transcription activator-like effector nuclease (TALEN), a TAL effector domain fusion protein, an RNA-guided DNA endonuclease, an engineered meganuclease, and a clustered regularly interspaced short palindromic repeats (CRISPR)-associated (Cas) endonuclease.

[0021] In certain embodiments, the present disclosure provides a method of preparing a TI host cell expressing a polypeptide of interest comprising: a) providing a TI host cell comprising at least one exogenous nucleotide sequence integrated at a site within one or more loci of the genome of the TI host cell, wherein the one or more loci are at least about 90% homologous to a sequence selected from SEQ ID No. 1-7, wherein the exogenous nucleotide sequence comprises one or more RRSs; b) introducing into the cell provided in a) a vector comprising one or more RRSs matching the one or more RRSs on the integrated exogenous nucleotide sequence and flanking at least one exogenous SOI operably linked to a regulatable promoter; c) introducing a recombinase or a nucleic acid encoding a recombinase, wherein the recombinase recognizes the RRSs; and d) selecting for TI cells expressing the exogenous SOI in the presence of an inducer to thereby isolate a TI host cell expressing the polypeptide of interest.

[0022] In certain embodiments, the present disclosure provides a method for expressing a polypeptide of interest comprising: a) providing a host cell comprising at least one exogenous SOI flanked by two RRSs and operably linked to a regulatable promoter integrated within a locus of the genome of the host cell, wherein the locus is at least about 90% homologous to a sequence selected from SEQ ID Nos. 1-7; and b) culturing the cell under conditions suitable for expressing the SOI and recovering a polypeptide of interest therefrom.

[0023] In certain embodiments, the present disclosure provides a method for preparing a TI host cell expressing a first and second polypeptide of interest (where the first and second polypeptides can be the same or different) comprising: a) providing a TI host cell comprising an exogenous nucleotide sequence integrated at a site within a locus of the genome of the host cell, wherein the locus is at least about 90% homologous to a sequence selected from SEQ ID Nos. 1-7, wherein the exogenous nucleotide sequence comprises a first, second RRS and a third RRS located between the first and the second RRS, wherein the first, second, and third RRSs are heterospecific, i.e. the first, second, and third RRSs are not matched RRSs and therefore any two of the first, second, and third RRSs would not be amenable to recombinase-mediated recombination; b) introducing into the cell provided in a) a first vector comprising two RRSs matching the first and the third RRS on the integrated exogenous nucleotide sequence and flanking at least one first exogenous SOI operably linked to a regulatable promoter; c) introducing into the cell provided in a) a second vector comprising two RRSs matching the second and the third RRS on the integrated exogenous nucleotide sequence and flanking at least one second exogenous SOI operably linked to a regulatable promoter; d) introducing one or more recombinases, or one or more nucleic acids encoding one or more recombinases, wherein the one or more recombinases recognize the RRSs; and e) selecting for TI cells expressing the exogenous SOI in the presence of an inducer to thereby isolate a TI host cell expressing the first and second polypeptides of interest.

### BRIEF DESCRIPTION OF THE DRAWINGS

[0024] FIG. 1 is a diagram showing an outline of the genome-wide screening steps for identifying CHO TI loci that allow for stable and high expression of antibodies.

[0025] FIGS. 2A and 2B depict two double selection schemes which were utilized to generate the targeted antibody expressing population. Transposase generated TI hosts are depicted in FIG. 2A and random integration generated TI hosts are depicted in FIG. 2B.

[0026] FIG. 3 depicts the productivity of the top clones generated by two particular TI hosts.

[0027] FIG. 4 depicts a two-plasmid RMCE strategy involving the use of three RRS sites to carry out two independent RMCEs simultaneously. One vector (front) comprises the RRS1, a first SOI and a promoter (P) followed by a start codon (ATG) and RRS3. The other vector (back) comprises the RRS3 fused to the coding sequence of a marker without the start codon (ATG), an SOI 2 and the RRS2. Only when the two plasmids are correctly targeted will the full expression cassette of the selection marker be assembled thus rendering cells resistance to selection.

[0028] FIG. 5 depicts the results of using either single-vector or two-vector RMCE in connection with the expression of Antibodies D, E, F, G, and J. FACS, genomic PCR, and gene copy analysis were assessed to confirm both plasmid cassettes were targeted correctly to the TI site. In two-plasmid RMCEs, more total HC and LC copies were targeted to the TI site as compared to single plasmid RMCE.

[0029] FIG. 6 depicts the titers of six molecules.

[0030] FIG. 7 depicts the results of using two-vector RMCE to express complex mAb formats. Two bispecific molecules, each requiring four different chains (two HCs and two LCs), were assay for production and % bispecific formation. In both cases, cell lines were developed exhibiting >1.5 g/L with >80% bispecific content.

[0031] FIG. 8 depicts the day 14 titers of four bispecific molecules.

[0032] FIGS. 9A and B depict the generation of cell lines expressing mAb-I or mAb-II in the RTI system. Histological results for cell line development are depicted in FIG. 9A and a schematic of a RTI cell line development (CLD) process is depicted in FIG. 9B.

[0033] FIGS. 10A to C depict the titer and specific productivity results of cell lines expressing mAb-I or mAb-II. Production end titer is depicted in FIG. 10A, production end IVCC is depicted in FIG. 10B and production end specific productivity is depicted in FIG. 10C.

[0034] FIGS. 11A and B depict the expression levels of HC and LC mRNA of mAb-I and mAb-II expressing cell lines. The expression levels of HC mRNA are depicted in FIG. 11A and the expression levels of HL mRNA are depicted in FIG. 11B.

[0035] FIGS. 12A to D depict the intracellular levels of HC, HL and BiP molecules in cell lines expressing mAb-I or mAb-II. A schematic of cycloheximide and Dox effects on an RTI system is depicted in FIG. 12A. The intracellular levels of HC, LC and BiP as well as the HC and LC levels in the supernatants of cell lines expressing mAb-A or mAb-B are depicted in FIG. 12B. The intracellular levels of HC, LC and BiP of cell lines expressing mAb-I or mAb-II after overnight CHX treatment are depicted in FIG. 12C. The intracellular levels of HC, LC and BiP of cell lines expressing mAb-I or mAb-II after doxycycline removal from culture media are depicted in FIG. 12D.

[0036] FIGS. 13A to D depict the correlation between the intracellular accumulation of BiP and mAb-I LC expression. The production end titer is depicted in FIG. 13A and the accumulation of HC, LC and BiP is depicted in FIG. 13B. A schematic representation of chain-swap experiments is depicted in FIG. 13C. The intracellular levels of HC, LC and BiP of RTI pools expressing mAb-I, mAb-II, or chain-swapped versions of these molecules are depicted in FIG. 13D.

[0037] FIGS. 14A to C depict the contribution of mAb-A HC and HL to the pool expression of this molecule. Production end titer is depicted in FIG. 14A, production end IVCC is depicted in FIG. 13B and production end specific productivity is depicted in FIG. 14C.

[0038] FIGS. 15A to B depict CDR regions of LC and HC that may contribute to poor expression. A schematic representation of the mAb-I and mAb-II LC subunits is depicted in FIG. 15A. A schematic representation of mAb-I and mAb-II HC regions is depicted in FIG. 15B.

[0039] FIGS. 16A to C depict the results of using two point mutations in HC constant region in connection with the expression of HC_{A}. The production end titer of various chain swaps between mAb-I and mAb-II HC and LC subunits is depicted in FIG. 16A. The intracellular levels of HC, LC and BiP of various RTI pools are depicted in FIG. 16B. A schematic of RTI system utilization as a diagnostic tool for low protein expression is depicted in FIG. 16C.

[0040] FIG. 17 depicts the production using two different cell culture processes.

[0041] FIGS. 18A to D depict the titer and specific productivity results for RMCE pools of three mAbs. Day 14 titer for RMCE pools of three mAbs comparing the HL and HLL configurations is depicted in FIG. 18A. Day 14 specific productivity (Qp) for RMCE pools of three mAbs comparing the HL and HLL configurations is depicted in FIG. 18B. Day 14 titer for clones generated from the pools of FIG. 18A are depicted in FIG. 18C. Day 14 Qp for clones generated from the pools of FIG. 18A are depicted in FIG. 18D. For FIGS. 18C and D six clones per configuration were tested.

[0042] FIGS. 19A to F depict titer, Qp, and growth (as expressed by the integral of viable cell concentration, IVCC), mRNA expression and protein expression for RMCE pools of mAb Y comparing three different plasmid configurations. Day 14 titer, Qp, and growth (as expressed by the integral of viable cell concentration, IVCC) are depicted in FIGS. 19A, B and C respectively. Each bar represents data from a single pool. Seed train mRNA expression and intracellular antibody protein expression from the pools in 19A. mRNA expression for heavy and light chain was normalized to the HLL-HL configuration; each bar the average of four technical replicates (error bars are standard deviation) mRNA expression for heavy and light chain was normalized to the HLL-HL configuration. Intracellular heavy and light chain protein expression from all pools quantified from western blots and normalized to the HLL-HL configuration, is depicted in FIG. 19E; each bar is the average of three technical replicates (error bars are standard deviation). A representative western blot image of the data shown in FIG. 19E is depicted in FIG. 19F.

[0043] FIGS. 20A to F depict titer, Qp, and growth (as expressed by the integral of viable cell concentration, IVCC) for mAb Y or mAb III expressing monoclones generated from RMCE pools with three different configurations. Day 14 titer for mAb Y expressing monoclones is depicted in FIG. 20A. Day 14 Qp for mAb Y expressing monoclones is depicted in FIG. 20B. Day 14 IVCC for mAb Y expressing clones is depicted in FIG. 20C. Day 14 titer for mAb III expressing monoclones is depicted in FIG. 20D. Day 14 Qp for mAb III expressing monoclones is depicted in FIG. 20E. Day 14 IVCC for mAb III expressing clones is depicted in FIG. 20F.

[0044] FIGS. 21A to D depict expression levels, titer and Qp of RMCE pools of various configurations. A schematic of the one heavy chain, one light chain plasmids transfected to assess the effect of plasmid position on chain expression is depicted in FIG. 21A. Antibody heavy (abbreviated as H) and light chain (abbreviated as L) were either expressed on the same plasmid or split between the front and back plasmids. L3, Loxfas, and 2L sites are noted, as is the pac puromycin resistance gene in the back plasmid. Seed train mRNA expression of heavy and light chain from pools with DNA configurations outlined in FIG. 21A are depicted in FIG. 23B. Day 14 titer for the RMCE pools of the various configurations is depicted in FIG. 21C. Day 14 Qp of the various configurations is depicted in FIG. 21D. Heavy and light chain DNA copy number for the pools is depicted in FIG. 21E.

[0045] FIG. 22A to D depict that the effect of HC:LC ratio on the High-molecular-weight species (HMWS) percentage of mAbs is independent of the TI site. Day 14 titer for antibody S on Host 7 cells is depicted in FIG. 22A. High-molecular-weight species (HMWS) percentage of antibody S is on Host 7 cells is depicted in FIG. 22B. Day 14 titer for antibody S on Host 4 cells is depicted in FIG. 22C. High-molecular-weight species (HMWS) percentage of antibody S is on Host 4 cells is depicted in FIG. 22D.

[0046] FIGS. 23A and B depict the effect of HC:LC ration on productivity and High-molecular-weight species (HMWS) of antibody IV. Day 14 titer for antibody IV on Host 4 cells is depicted in FIG. 23A. High-molecular-weight species (HMWS) percentage of antibody IV on Host 4 cells is depicted in FIG. 23D.

[0047] FIGS. 24A and B depict the effect of HC:LC ratio on productivity and High-molecular-weight species (HMWS) of antibody VI in a two-site TI host cells. Day 14 titer for antibody VI on two-site TI host cells is depicted in FIG. 24A. High-molecular-weight species (HMWS) percentage of antibody VI on two-site TI host cells is depicted in FIG. 24B.

[0048] FIG. 25 depicts 2 clones with titers of 8.4 and 8.7 g/L with 7.4% and 5.6% aggregates, respectively.

[0049] FIG. 26 depicts Day 14 titer of antibody Z in different regulated targeted integration cell lines.

[0050] FIG. 27 specific productivity of antibody Z in different regulated targeted integration cell lines.

### DETAILED DESCRIPTION

[0051] In certain embodiments, the host cells, genetic constructs (e.g., vectors), compositions, and methods described herein can be employed in the development and/or use of a targeted integration (TI) host cell. In certain embodiments, such TI host cells comprise an exogenous nucleotide sequence integrated within a specific gene or a specific locus of the genome of the host cell.

[0052] For purposes of clarity of disclosure and not by way of limitation, the detailed description is divided into the following subsections:
[0053] 1. Definitions
[0054] 2. Integration Sites
[0055] 3. Exogenous Nucleotide Sequences
[0056] 4. Host Cells
[0057] 5. Targeted Integration
[0058] 6. Preparation and Use of TI Host Cells
[0059] 7. Products
[0060] 8. Exemplary Non-Limiting Embodiments

### 1. Definitions

[0061] Unless otherwise defined, all technical and scientific terms used herein have the same meaning as commonly understood by one of ordinary skill in the art. In case of conflict, the present document, including definitions, will control. Preferred methods and materials are described below, although methods and materials similar or equivalent to those described herein can be used in practice or testing of the presently disclosed subject matter. All publications, patent applications, patents and other references mentioned herein are incorporated by reference in their entirety. The materials, methods, and examples disclosed herein are illustrative only and not intended to be limiting.

[0062] The terms “comprise(s),” “include(s),” “having,” “has,” “can,” “contain(s),” and variants thereof, as used herein, are intended to be open-ended transitional phrases, terms, or words that do not preclude the possibility of additional acts or structures. The singular forms “a,” “an” and “the” include plural references unless the context clearly dictates otherwise. The present disclosure also contemplates other embodiments “comprising,” “consisting of”, and “consisting essentially of,” the embodiments or elements presented herein, whether explicitly set forth or not.

[0063] For the recitation of numeric ranges herein, each intervening number there between with the same degree of precision is explicitly contemplated. For example, for the range of 6-9, the numbers 7 and 8 are contemplated in addition to 6 and 9, and for the range 6.0-7.0, the number 6.0, 6.1, 6.2, 6.3, 6.4, 6.5, 6.6, 6.7, 6.8, 6.9, and 7.0 are explicitly contemplated.

[0064] As used herein, the term “about” or “approximately” means within an acceptable error range for the particular value as determined by one of ordinary skill in the art, which will depend in part on how the value is measured or determined, i.e., the limitations of the measurement system. For example, “about” can mean within 3 or more than 3 standard deviations, per the practice in the art. Alternatively, “about” can mean a range of up to 20%, preferably up to 10%, more preferably up to 5%, and more preferably still up to 1% of a given value. Alternatively, particularly with respect to biological systems or processes, the term can mean within an order of magnitude, preferably within 5-fold, and more preferably within 2-fold, of a value.

[0065] As used herein, the term “selection marker” can be a gene that allows cells carrying the gene to be specifically selected for or against, in the presence of a corresponding selection agent. For example, but not by way of limitation, a selection marker can allow the host cell transformed with the selection marker gene to be positively selected for in the presence of the gene; a non-transformed host cell would not be capable of growing or surviving under the selective conditions. Selection markers can be positive, negative or bi-functional. Positive selection markers can allow selection for cells carrying the marker, whereas negative selection markers can allow cells carrying the marker to be selectively eliminated. A selection marker can confer resistance to a drug or compensate for a metabolic or catabolic defect in the host cell. In prokaryotic cells, amongst others, genes conferring resistance against ampicillin, tetracycline, kanamycin or chloramphenicol can be used. Resistance genes useful as selection markers in eukaryotic cells include, but are not limited to, genes for aminoglycoside phosphotransferase (APH) (e.g., hygromycin phosphotransferase (HYG), neomycin and G418 APH), dihydrofolate reductase (DHFR), thymidine kinase (TK), glutamine synthetase (GS), asparagine synthetase, tryptophan synthetase (indole), histidinol dehydrogenase (histidinol D), and genes encoding resistance to puromycin, blasticidin, bleomycin, phleomycin, chloramphenicol, Zeocin, and mycophenolic acid. Further marker genes are described in WO 92/08796 and WO 94/28143.

[0066] Beyond facilitating a selection in the presence of a corresponding selection agent, a selection marker can alternatively provide a gene encoding a molecule normally not present in the cell, e.g., green fluorescent protein (GFP), enhanced GFP (eGFP), synthetic GFP, yellow fluorescent protein (YFP), enhanced YFP (eYFP), cyan fluorescent protein (CFP), mPlum, mCherry, tdTomato, mStrawberry, J-red, DsRed-monomer, mOrange, mKO, mCitrine, Venus, YPet, Emerald, CyPet, mCFPm, Cerulean, and T-Sapphire. Cells harboring such a gene can be distinguished from cells not harboring this gene, e.g., by the detection of the fluorescence emitted by the encoded polypeptide.

[0067] As used herein, the term “operably linked” refers to a juxtaposition of two or more components, wherein the components are in a relationship permitting them to function in their intended manner. For example, a promoter and/or an enhancer is operably linked to a coding sequence if the promoter and/or enhancer acts to modulate the transcription of the coding sequence. In certain embodiments, DNA sequences that are “operably linked” are contiguous and adjacent on a single chromosome. In certain embodiments, e.g., when it is necessary to join two protein encoding regions, such as a secretory leader and a polypeptide, the sequences are contiguous, adjacent, and in the same reading frame. In certain embodiments, an operably linked promoter is located upstream of the coding sequence and can be adjacent to it. In certain embodiments, e.g., with respect to enhancer sequences modulating the expression of a coding sequence, the two components can be operably linked although not adjacent. An enhancer is operably linked to a coding sequence if the enhancer increases transcription of the coding sequence. Operably linked enhancers can be located upstream, within, or downstream of coding sequences and can be located a considerable distance from the promoter of the coding sequence. Operable linkage can be accomplished by recombinant methods known in the art, e.g., using PCR methodology and/or by ligation at convenient restriction sites. If convenient restriction sites do not exist, then synthetic oligonucleotide adaptors or linkers can be used in accord with conventional practice. An internal ribosomal entry site (IRES) is operably linked to an open reading frame (ORF) if it allows initiation of translation of the ORF at an internal location in a 5′ end-independent manner.

[0068] As used herein, the term “expression” refers to transcription and/or translation. In certain embodiments, the level of transcription of a desired product can be determined based on the amount of corresponding mRNA that is present. For example, mRNA transcribed from a sequence of interest can be quantitated by PCR or by Northern hybridization. In certain embodiments, protein encoded by a sequence of interest can be quantitated by various methods, e.g. by ELISA, by assaying for the biological activity of the protein, or by employing assays that are independent of such activity, such as Western blotting or radioimmunoassay, using antibodies that recognize and bind to the protein.

[0069] The term “antibody” herein is used in the broadest sense and encompasses various antibody structures, including but not limited to monoclonal antibodies, polyclonal antibodies, multispecific antibodies (e.g., bispecific antibodies), half antibodies, and antibody fragments so long as they exhibit a desired antigen-binding activity.

[0070] As used herein, the term “antibody fragment” refers to a molecule other than an intact antibody that comprises a portion of an intact antibody that binds the antigen to which the intact antibody binds. Examples of antibody fragments include but are not limited to Fv, Fab, Fab′, Fab′-SH, F(ab′) 2; diabodies; linear antibodies; single-chain antibody molecules (e.g., scFv); and multispecific antibodies formed from antibody fragments. For a review of certain antibody fragments, see Holliger and Hudson, Nature Biotechnology 23:1126-1136 (2005).

[0071] As used herein, the term “variable region” or “variable domain” refers to the domain of an antibody heavy or light chain that is involved in binding the antibody to antigen. The variable domains of the heavy chain and light chain (V_{H} and V_{L}, respectively) of a native antibody generally have similar structures, with each domain comprising four conserved framework regions (FRs) and three hypervariable regions (HVRs). (See, e.g., Kindt et al. Kuby Immunology, 6th ed., W.H. Freeman and Co., page 91 (2007).) A single V_{H} or V_{L} domain may be sufficient to confer antigen-binding specificity. Furthermore, antibodies that bind to a particular antigen may be isolated using a V_{H} or V_{L} domain from an antibody that binds the antigen to screen a library of complementary V_{L} or V_{H} domains, respectively. See, e.g., Portolano et al., J. Immunol. 150:880-887 (1993); Clarkson et al., Nature 352:624-628 (1991).

[0072] As used herein, the term “heavy chain” refers to an immunoglobulin heavy chain.

[0073] As used herein, the term “light chain” refers to an immunoglobulin light chain.

[0074] The “class” of an antibody refers to the type of constant domain or constant region possessed by its heavy chain. There are five major classes of antibodies: IgA, IgD, IgE, IgG, and IgM, and several of these may be further divided into subclasses (isotypes), e.g., IgG1, IgG2, IgG3, IgG4, IgA1, and IgA2. The heavy chain constant domains that correspond to the different classes of immunoglobulins are called a, 8, 8, Y, and u, respectively.

[0075] The term “monoclonal antibody” as used herein refers to an antibody obtained from a population of substantially homogeneous antibodies, i.e., the individual antibodies comprising the population are identical and/or bind the same epitope, except for possible variant antibodies, e.g., containing naturally occurring mutations or arising during production of a monoclonal antibody preparation, such variants generally being present in minor amounts. In contrast to polyclonal antibody preparations, which typically include different antibodies directed against different determinants (epitopes), each monoclonal antibody of a monoclonal antibody preparation is directed against a single determinant on an antigen. Thus, the modifier “monoclonal” indicates the character of the antibody as being obtained from a substantially homogeneous population of antibodies, and is not to be construed as requiring production of the antibody by any particular method. For example, the monoclonal antibodies in accordance with the present invention may be made by a variety of techniques, including but not limited to the hybridoma method, recombinant DNA methods, phage-display methods, and methods utilizing transgenic animals containing all or part of the human immunoglobulin loci, such methods and other exemplary methods for making monoclonal antibodies being described herein.

[0076] “Multispecific antibodies” are monoclonal antibodies that have binding specificities for at least two different sites, i.e., different epitopes on different antigens or different epitopes on the same antigen. In certain aspects, the multispecific antibody has three or more binding specificities. Multispecific antibodies may be prepared as full-length antibodies or antibody fragments.

[0077] The terms “full length antibody”, “intact antibody”, and “whole antibody” are used herein interchangeably to refer to an antibody having a structure substantially similar to a native antibody structure or having heavy chains that contain an Fc region as defined herein.

[0078] An “antibody fragment” refers to a molecule other than an intact antibody that comprises a portion of an intact antibody that binds the antigen to which the intact antibody binds. Examples of antibody fragments include but are not limited to Fv, Fab, Fab′, Fab′-SH, F(ab′) 2; diabodies; linear antibodies; single-chain antibody molecules (e.g., scFv, and scFab); single domain antibodies (dAbs); and multispecific antibodies formed from antibody fragments. For a review of certain antibody fragments, see Holliger and Hudson, Nature Biotechnology 23:1126-1136 (2005).

[0079] The term “chimeric” antibody refers to an antibody in which a portion of the heavy and/or light chain is derived from a particular source or species, while the remainder of the heavy and/or light chain is derived from a different source or species.

[0080] A “human antibody” is one which possesses an amino acid sequence which corresponds to that of an antibody produced by a human or a human cell or derived from a non-human source that utilizes human antibody repertoires or other human antibody-encoding sequences. This definition of a human antibody specifically excludes a humanized antibody comprising non-human antigen-binding residues.

[0081] A “humanized” antibody refers to a chimeric antibody comprising amino acid residues from non-human CDRs and amino acid residues from human FRs. In certain aspects, a humanized antibody will comprise substantially all of at least one, and typically two, variable domains, in which all or substantially all of the CDRs correspond to those of a non-human antibody, and all or substantially all of the FRs correspond to those of a human antibody. A humanized antibody optionally may comprise at least a portion of an antibody constant region derived from a human antibody. A “humanized form” of an antibody, e.g., a non-human antibody, refers to an antibody that has undergone humanization. The term “monoclonal antibody” as used herein refers to an antibody obtained from a population of substantially homogeneous antibodies, i.e., the individual antibodies comprising the population are identical and/or bind the same epitope, except for possible variant antibodies, e.g., containing naturally occurring mutations or arising during production of a monoclonal antibody preparation, such variants generally being present in minor amounts. In contrast to polyclonal antibody preparations, which typically include different antibodies directed against different determinants (epitopes), each monoclonal antibody of a monoclonal antibody preparation is directed against a single determinant on an antigen. Thus, the modifier “monoclonal” indicates the character of the antibody as being obtained from a substantially homogeneous population of antibodies, and is not to be construed as requiring production of the antibody by any particular method.

[0082] The term “therapeutic antibody” refers to an antibody that is used in the treatment of disease. A therapeutic antibody may have various mechanisms of action. A therapeutic antibody may bind and neutralize the normal function of a target associated with an antigen. For example, a monoclonal antibody that blocks the activity of the of protein needed for the survival of a cancer cell causes the cell's death. Another therapeutic monoclonal antibody may bind and activate the normal function of a target associated with an antigen. For example, a monoclonal antibody can bind to a protein on a cell and trigger an apoptosis signal. Yet another monoclonal antibody may bind to a target antigen expressed only on diseased tissue; conjugation of a toxic payload (effective agent), such as a chemotherapeutic or radioactive agent, to the monoclonal antibody can create an agent for specific delivery of the toxic payload to the diseased tissue, reducing harm to healthy tissue. A “biologically functional fragment” of a therapeutic antibody will exhibit at least one if not some or all of the biological functions attributed to the intact antibody, the function comprising at least specific binding to the target antigen.

[0083] The term “diagnostic antibody” refers to an antibody that is used as a diagnostic reagent for a disease. The diagnostic antibody may bind to a target antigen that is specifically associated with, or shows increased expression in, a particular disease. The diagnostic antibody may be used, for example, to detect a target in a biological sample from a patient, or in diagnostic imaging of disease sites, such as tumors, in a patient. A “biologically functional fragment” of a diagnostic antibody will exhibit at least one if not some or all of the biological functions attributed to the intact antibody, the function comprising at least specific binding to the target antigen.

[0084] The terms “host cell”, “host cell line”, and “host cell culture” are used interchangeably and refer to cells into which exogenous nucleic acid has been introduced, including the progeny of such cells. Host cells include “transformants” and “transformed cells”, which include the primary transformed cell and progeny derived therefrom without regard to the number of passages. Progeny may not be completely identical in nucleic acid content to a parent cell, but may contain mutations. Mutant progeny that have the same function or biological activity as screened or selected for in the originally transformed cell are included herein.

[0085] The term “nucleic acid molecule” or “polynucleotide” includes any compound and/or substance that comprises a polymer of nucleotides. Each nucleotide is composed of a base, specifically a purine- or pyrimidine base (i.e. cytosine (C), guanine (G), adenine (A), thymine (T) or uracil (U)), a sugar (i.e. deoxyribose or ribose), and a phosphate group. Often, the nucleic acid molecule is described by the sequence of bases, whereby said bases represent the primary structure (linear structure) of a nucleic acid molecule. The sequence of bases is typically represented from 5′ to 3′. Herein, the term nucleic acid molecule encompasses deoxyribonucleic acid (DNA) including e.g., complementary DNA (cDNA) and genomic DNA, ribonucleic acid (RNA), in particular messenger RNA (mRNA), synthetic forms of DNA or RNA, and mixed polymers comprising two or more of these molecules. The nucleic acid molecule may be linear or circular. In addition, the term nucleic acid molecule includes both, sense and antisense strands, as well as single stranded and double stranded forms. Moreover, the herein described nucleic acid molecule can contain naturally occurring or non-naturally occurring nucleotides. Examples of non-naturally occurring nucleotides include modified nucleotide bases with derivatized sugars or phosphate backbone linkages or chemically modified residues. Nucleic acid molecules also encompass DNA and RNA molecules which are suitable as a vector for direct expression of an antibody of the invention in vitro and/or in vivo, e.g., in a host or patient. Such DNA (e.g., cDNA) or RNA (e.g., mRNA) vectors, can be unmodified or modified. For example, mRNA can be chemically modified to enhance the stability of the RNA vector and/or expression of the encoded molecule so that mRNA can be injected into a subject to generate the antibody in vivo (see e.g., Stadler et al, Nature Medicine 2017, published online 12 Jun. 2017, doi: 10.1038/nm.4356 or EP 2 101 823 B1).

[0086] An “isolated” nucleic acid refers to a nucleic acid molecule that has been separated from a component of its natural environment. An isolated nucleic acid includes a nucleic acid molecule contained in cells that ordinarily contain the nucleic acid molecule, but the nucleic acid molecule is present extrachromosomally or at a chromosomal location that is different from its natural chromosomal location.

[0087] As used herein, the term “vector” refers to a nucleic acid molecule capable of propagating another nucleic acid to which it is linked. The term includes the vector as a self-replicating nucleic acid structure as well as the vector incorporated into the genome of a host cell into which it has been introduced. In certain embodiments, vectors direct the expression of nucleic acids to which they are operatively linked. Such vectors are referred to herein as “expression vectors.”

[0088] As used herein, the term “homologous sequences” refers to sequences that share a significant sequence similarity as determined by an alignment of the sequences. For example, two sequences can be about 50%, 60%, 70%, 80%, 90%, 95%, 99%, or 99.9% homologous. The alignment is carried out by algorithms and computer programs including, but not limited to, BLAST, FASTA, and HMME, which compares sequences and calculates the statistical significance of matches based on factors such as sequence length, sequence identify and similarity, and the presence and length of sequence mismatches and gaps. Homologous sequences can refer to both DNA and protein sequences.

[0089] As used herein, the term “flanking” refers to that a first nucleotide sequence is located at either a 5′ or 3′ end, or both ends of a second nucleotide sequence. The flanking nucleotide sequence can be adjacent to or at a defined distance from the second nucleotide sequence. There is no specific limit of the length of a flanking nucleotide sequence. For example, a flanking sequence can be a few base pairs or a few thousand base pairs. In certain embodiments, the length of a flanking nucleotide sequence can be about at least 15 base pairs, at least 20 base pairs, at least 30 base pairs, at least 40 base pairs, at least 50 base pairs, at least 75 base pairs, at least 100 base pairs, at least 150 base pairs, at least 200 base pairs, at least 300 base pairs, at least 400 base pairs, at least 500 base pairs, at least 1,000 base pairs, at least 1,500 base pairs, at least 2,000 base pairs, at least 3,000 base pairs, at least 4,000 base pairs, at least 5,000 base pairs, at least 6,000 base pairs, at least 7,000 base pairs, at least 8,000 base pairs, at least 9,000 base pairs, at least 10,000 base pairs.

[0090] As used herein, the term “exogenous” indicates that a nucleotide sequence does not originate from a host cell and is introduced into a host cell by traditional DNA delivery methods, e.g., by transfection, electroporation, or transformation methods. The term “endogenous” refers to that a nucleotide sequence originates from a host cell. An “exogenous” nucleotide sequence can have an “endogenous” counterpart that is identical in base compositions, but where the “exogenous” sequence is introduced into the host cell, e.g., via recombinant DNA technology.

### 2. Integration Sites

[0091] The presently disclosed subject matter provides a host cell suitable for targeted integration of exogenous nucleotide sequences. In certain embodiments, the host cell comprises an exogenous nucleotide sequence integrated at an integration site on the genome of the host cell, i.e., a TI host cell.

[0092] An “integration site” comprises a nucleic acid sequence within a host cell genome into which an exogenous nucleotide sequence is inserted. In certain embodiments, an integration site is between two adjacent nucleotides on the host cell genome. In certain embodiments, an integration site includes a stretch of nucleotides between any of which an exogenous nucleotide sequence can be inserted. In certain embodiments, the integration site is located within a specific locus of the genome of the TI host cell. In certain embodiments, the integration site is within an endogenous gene of the TI host cell.

[0093] In certain embodiments, the exogenous nucleotide sequence is integrated at a site within a specific locus of the genome of a TI host cell. In certain embodiments, the locus into which the exogenous nucleotide sequence is integrated is at least about 50%, at least about 60%, at least about 70%, at least about 80%, at least about 90%, at least about 95%, at least about 99%, or at least about 99.9% homologous to a sequence selected from SEQ ID Nos. 1-7.

[0094] In certain embodiments, the exogenous nucleotide sequence is integrated at a site within a specific locus of the genome of a TI host cell. In certain embodiments, the locus into which the exogenous nucleotide sequence is integrated is at least about 50%, at least about 60%, at least about 70%, at least about 80%, at least about 90%, at least about 95%, at least about 99%, or at least about 99.9% homologous to a sequence selected from Contigs NW_006874047.1, NW_006884592.1, NW_006881296.1, NW_003616412.1, NW_003615063.1, NW_006882936.1, and NW_003615411.1.

[0095] In certain embodiments, the exogenous nucleotide sequence is integrated at an integration site located within a position selected from nucleotides numbered 1-1,000 bp; 1,000-2,000 bp; 2,000-3,000 bp; 3,000-4,000 bp; and 4,000-4,301 bp of SEQ ID No. 1. In certain embodiments, the exogenous nucleotide sequence is integrated at an integration site located within a position selected from nucleotides numbered 1-100,000 bp; 100,000-200,000 bp; 200,000-300,000 bp; 300,000-400,000 bp; 400,000-500,000 bp; 500,000-600,000 bp; 600,000-700,000 bp; and 700,000-728785 bp of SEQ ID No. 2. In certain embodiments, the exogenous nucleotide sequence is integrated at an integration site located within a position selected from nucleotides numbered 1-100,000 bp; 100,000-200,000 bp; 200,000-300,000 bp; 300,000-400,000 bp; and 400,000-413,983 of SEQ ID No. 3. In certain embodiments, the exogenous nucleotide sequence is integrated at an integration site located within a position selected from nucleotides numbered 1-10,000 bp; 10,000-20,000 bp; 20,000-30,000 bp; and 30,000-30,757 bp of SEQ ID No. 4. In certain embodiments, the exogenous nucleotide sequence is integrated at an integration site located within a position selected from nucleotides numbered 1-10,000 bp; 10,000-20,000 bp; 20,000-30,000 bp; 30,000-40,000 bp; 40,000-50,000 bp; 50,000-60,000 bp; and 60,000-68,962 bp of SEQ ID No. 5. In certain embodiments, the exogenous nucleotide sequence is integrated at an integration site located within a position selected from nucleotides numbered 1-10,000 bp; 10,000-20,000 bp; 20,000-30,000 bp; 30,000-40,000 bp; 40,000-50,000 bp; and 50,000-51,326 bp of SEQ ID No. 6. In certain embodiments, the exogenous nucleotide sequence is integrated at an integration site located within a position selected from nucleotides numbered 1-10,000 bp; 10,000-20,000 bp; and 20,000-22,904 bp of SEQ ID No. 7.

[0096] In certain embodiments, the nucleotide sequence immediately 5′ of the integrated exogenous sequence is selected from the group consisting of nucleotides 41190-45269 of NW_006874047.1, nucleotides 63590-207911 of NW_006884592.1, nucleotides 253831-491909 of NW_006881296.1, nucleotides 69303-79768 of NW_003616412.1, nucleotides 293481-315265 of NW_003615063.1, nucleotides 2650443-2662054 of NW_006882936.1, or nucleotides 82214-97705 of NW_003615411.1 and sequences at least 50% homologous thereto. In certain embodiments, the nucleotide sequence immediately 5′ of the integrated exogenous sequence are at least about 50%, at least about 60%, at least about 70%, at least about 80%, at least about 90%, at least about 95%, at least about 99%, or at least about 99.9% homologous to nucleotides 41190-45269 of NW_006874047.1, nucleotides 63590-207911 of NW_006884592.1, nucleotides 253831-491909 of NW_006881296.1, nucleotides 69303-79768 of NW_003616412.1, nucleotides 293481-315265 of NW_003615063.1, nucleotides 2650443-2662054 of NW_006882936.1, or nucleotides 82214-97705 of NW_003615411.1.

[0097] In certain embodiments, the nucleotide sequence immediately 3′ of the integrated exogenous sequence is selected from the group consisting of nucleotides 45270-45490 of NW_006874047.1, nucleotides 207912-792374 of NW_006884592.1, nucleotides 491910-667813 of NW_006881296.1, nucleotides 79769-100059 of NW_003616412.1, nucleotides 315266-362442 of NW_003615063.1, nucleotides 2662055-2701768 of NW_006882936.1, or nucleotides 97706-105117 of NW_003615411.1 and sequences at least 50% homologous thereto. In certain embodiments, the nucleotide sequence immediately 3′ of the integrated exogenous sequence is at least about 50%, at least about 60%, at least about 70%, at least about 80%, at least about 90%, at least about 95%, at least about 99%, or at least about 99.9% homologous to nucleotides 45270-45490 of NW_006874047.1, nucleotides 207912-792374 of NW_006884592.1, nucleotides 491910-667813 of NW_006881296.1, nucleotides 79769-100059 of NW_003616412.1, nucleotides 315266-362442 of NW_003615063.1, nucleotides 2662055-2701768 of NW_006882936.1, or nucleotides 97706-105117 of NW_003615411.1.

[0098] In certain embodiments, the integrated exogenous nucleotide sequence is operably linked to a nucleotide sequence selected from the group consisting of SEQ ID. Nos. 1-7 and sequences at least 50% homologous thereto. In certain embodiments, the nucleotide sequence operably linked to the exogenous nucleotide sequence is at least about 50%, at least about 60%, at least about 70%, at least about 80%, at least about 90%, at least about 95%, at least about 99%, or at least about 99.9% homologous to a sequence selected from SEQ ID Nos. 1-7. In certain embodiments, the integrated exogenous nucleotide sequence comprises at least one SOI. In certain embodiments, the operably linked nucleotide sequence increases the expression level of the SOI compared to a randomly integrated SOI. In certain embodiments, the integrated exogenous SOI is expressed at about 20%, 30%, 40%, 50%, 100%, 2 fold, 3 fold, 5 fold, or 10 fold higher than a randomly integrated SOI.

[0099] In certain embodiments, the integrated exogenous sequence is flanked 5′ by a nucleotide sequence selected from the group consisting of nucleotides 41190-45269 of NW_006874047.1, nucleotides 63590-207911 of NW_006884592.1, nucleotides 253831-491909 of NW_006881296.1, nucleotides 69303-79768 of NW_003616412.1, nucleotides 293481-315265 of NW_003615063.1, nucleotides 2650443-2662054 of NW_006882936.1, and nucleotides 82214-97705 of NW_003615411.1.and sequences at least 50% homologous thereto, and is flanked 3′ by a nucleotide sequence selected from the group consisting of nucleotides 45270-45490 of NW_006874047.1, nucleotides 207912-792374 of NW_006884592.1, nucleotides 491910-667813 of NW_006881296.1, nucleotides 79769-100059 of NW_003616412.1, nucleotides 315266-362442 of NW_003615063.1, nucleotides 2662055-2701768 of NW_006882936.1, and nucleotides 97706-105117 of NW_003615411.1 and sequences at least 50% homologous thereto. In certain embodiments, the nucleotide sequence flanking 5′ of the integrated exogenous nucleotide sequence is at least about 50%, at least about 60%, at least about 70%, at least about 80%, at least about 90%, at least about 95%, at least about 99%, or at least about 99.9% homologous to nucleotides 41190-45269 of NW_006874047.1, nucleotides 63590-207911 of NW_006884592.1, nucleotides 253831-491909 of NW_006881296.1, nucleotides 69303-79768 of NW_003616412.1, nucleotides 293481-315265 of NW_003615063.1, nucleotides 2650443-2662054 of NW_006882936.1, and nucleotides 82214-97705 of NW_003615411.1, and the nucleotide sequences flanking 3′ of the integrated exogenous nucleotide sequence is at least about 50%, at least about 60%, at least about 70%, at least about 80%, at least about 90%, at least about 95%, at least about 99%, or at least about 99.9% homologous to SEQ ID Nos. nucleotides 45270-45490 of NW_006874047.1, nucleotides 207912-792374 of NW_006884592.1, nucleotides 491910-667813 of NW_006881296.1, nucleotides 79769-100059 of NW_003616412.1, nucleotides 315266-362442 of NW_003615063.1, nucleotides 2662055-2701768 of NW_006882936.1, and nucleotides 97706-105117 of NW_003615411.1.

[0100] In certain embodiments, the integrated exogenous nucleotide is integrated into a locus immediately adjacent to all or a portion of a sequence selected from the group consisting of sequences at least about 90% homologous to a sequence selected from SEQ ID Nos. 1-7.

[0101] In certain embodiments, the integrated exogenous nucleotide sequence is adjacent to a nucleotide sequence selected from the group consisting of SEQ ID. Nos. 1-7 and sequences at least 50% homologous thereto. In certain embodiments, the integrated exogenous nucleotide sequence is within about 100 bp, about 200 bp, about 500 bp, about 1 kb distance from a sequence selected from the group consisting of SEQ ID. Nos. 1-7 and sequences at least 50% homologous thereto. In certain embodiments, the nucleotide sequence adjacent to the exogenous nucleotide sequence is at least about 50%, at least about 60%, at least about 70%, at least about 80%, at least about 90%, at least about 95%, at least about 99%, or at least about 99.9% homologous to a sequence selected from SEQ ID Nos. 1-7.

[0102] In certain embodiments, the exogenous nucleotide sequence is integrated at an integration site adjacent to a position selected from nucleotides numbered 1-1,000 bp; 1,000-2,000 bp; 2,000-3,000 bp; 3,000-4,000 bp; and 4,000-4,301 bp of SEQ ID No. 1. In certain embodiments, the exogenous nucleotide sequence is integrated at an integration site adjacent to a position selected from nucleotides numbered 1-100,000 bp; 100,000-200,000 bp; 200,000-300,000 bp; 300,000-400,000 bp; 400,000-500,000 bp; 500,000-600,000 bp; 600,000-700,000 bp; and 700,000-728785 bp of SEQ ID No. 2. In certain embodiments, the exogenous nucleotide sequence is integrated at an integration site adjacent to a position selected from nucleotides numbered 1-100,000 bp; 100,000-200,000 bp; 200,000-300,000 bp; 300,000-400,000 bp; and 400,000-413,983 of SEQ ID No. 3. In certain embodiments, the exogenous nucleotide sequence is integrated at an integration site adjacent to a position selected from nucleotides numbered 1-10,000 bp; 10,000-20,000 bp; 20,000-30,000 bp; and 30,000-30,757 bp of SEQ ID No. 4. In certain embodiments, the exogenous nucleotide sequence is integrated at an integration site adjacent to a position selected from nucleotides numbered 1-10,000 bp; 10,000-20,000 bp; 20,000-30,000 bp; 30,000-40,000 bp; 40,000-50,000 bp; 50,000-60,000 bp; and 60,000-68,962 bp of SEQ ID No. 5. In certain embodiments, the exogenous nucleotide sequence is integrated at an integration site adjacent to a position selected from nucleotides numbered 1-10,000 bp; 10,000-20,000 bp; 20,000-30,000 bp; 30,000-40,000 bp; 40,000-50,000 bp; and 50,000-51,326 bp of SEQ ID No. 6. In certain embodiments, the exogenous nucleotide sequence is integrated at an integration site adjacent to a position selected from nucleotides numbered 1-10,000 bp; 10,000-20,000 bp; and 20,000-22,904 bp of SEQ ID No. 7.

[0103] In certain embodiments, the locus comprising the integration site of the exogenous nucleotide sequence does not encode an open reading frame (ORF). In certain embodiments, the locus comprising the integration site of the exogenous nucleotide sequence includes cis-acting elements, e.g., promoters and enhancers. In certain embodiments, the locus comprising the integration site of the exogenous nucleotide sequence is free of any cis-acting elements, e.g., promoters and enhancers, that enhance gene expression.

[0104] In certain embodiments, an exogenous nucleotide sequence is integrated at an integration site within an endogenous gene selected from the group consisting of LOC107977062, LOC100768845, ITPR2, ERE67000.1, UBAP2, MTMR2, and XP_003512331.2. The endogenous LOC107977062, LOC100768845, ITPR2, ERE67000.1, UBAP2, MTMR2, and XP_003512331.2 genes include the wild-type and all homologous sequences of LOC107977062, LOC100768845, ITPR2, ERE67000.1, UBAP2, MTMR2, and XP_003512331.2 genes. In certain embodiments, the homologous sequences of LOC107977062, LOC100768845, ITPR2, ERE67000.1, UBAP2, MTMR2, and XP_003512331.2 genes can be at least about 50%, at least about 60%, at least about 70%, at least about 80%, at least about 90%, at least about 95%, at least about 99%, or at least about 99.9% homologous to the wild-type LOC107977062, LOC100768845, ITPR2, ERE67000.1, UBAP2, MTMR2, and XP_003512331.2 genes. In certain embodiments, the LOC107977062, LOC100768845, ITPR2, ERE67000.1, UBAP2, MTMR2, and XP_003512331.2 genes are wild-type mammalian LOC107977062, LOC100768845, ITPR2, ERE67000.1, UBAP2, MTMR2, and XP_003512331.2 genes. In certain embodiments, the LOC107977062, LOC100768845, ITPR2, ERE67000.1, UBAP2, MTMR2, and XP_003512331.2 genes are wild-type human LOC107977062, LOC100768845, ITPR2, ERE67000.1, UBAP2, MTMR2, and XP_003512331.2 genes. In certain embodiments, the LOC107977062, LOC100768845, ITPR2, ERE67000.1, UBAP2, MTMR2, and XP_003512331.2 genes are wild-type hamster LOC107977062, LOC100768845, ITPR2, ERE67000.1, UBAP2, MTMR2, and XP_003512331.2 genes.

[0105] In certain embodiments, the integration site is operably linked to an endogenous gene selected from the group consisting of LOC107977062, LOC100768845, ITPR2, ERE67000.1, UBAP2, MTMR2, XP_003512331.2, and at least about 90% homologous sequences thereof. In certain embodiments, the integration site is flanked by an endogenous gene selected from the group consisting of LOC107977062, LOC100768845, ITPR2, ERE67000.1, UBAP2, MTMR2, XP_003512331.2, and at least about 90% homologous sequences thereof.

[0106] Table 1 provides exemplary TI host cell integration sites:

TABLE 1
TI host cell integration sites

| | | Contig | Integration | |
|---|---|---|---|---|
| Host | Contig | Size (kb) | site (bp) | Gene (SEQ ID No.) |
| 1 | NW_006874047.1 | 727 | 45269 | LOC107977062 (SEQ ID No. 1) |
| | (SEQ ID NO: 8) | | | |
| 2 | NW_006884592.1 | 931 | 207911 | LOC100768845 (SEQ ID No. 2) |
| | (SEQ ID NO: 9) | | | |
| 3 | NW_006881296.1 | 1016 | 491909 | ITPR2 (SEQ ID No. 3) |
| | (SEQ ID NO: 10) | | | |
| 4 | NW_003616412.1 | 127 | 79768 | ERE67000.1 (SEQ ID No. 4) |
| | (SEQ ID NO: 11) | | | |
| 5 | NW_003615063.1 | 372 | 315265 | UBAP2 (SEQ ID No. 5) |
| | (SEQ ID NO: 12) | | | |
| 6 | NW_006882936.1 | 3042 | 2662054 | MTMR2 (SEQ ID No. 6) |
| | (SEQ ID NO: 13) | | | |
| 7 | NW_003615411.1 | 277 | 97706 | XP_003512331.2 (SEQ ID No. 7) |
| | (SEQ ID NO: 14) | | | |

[0107] In certain embodiments, an integration site and/or the nucleotide sequences flanking the integration site can be identified experimentally. In certain embodiments, an integration site and/or the nucleotide sequences flanking the integration site can be identified by genome-wide screening approaches to isolate host cells that express, at a desirable level, a polypeptide of interest encoded by one or more SOIs integrated into one or more exogenous nucleotide sequences, where the exogenous sequences are themselves integrated into one or more loci in the genome of the host cell. In certain embodiments, an integration site and/or the nucleotide sequences flanking an integration site can be identified by genome-wide screening approaches following transposase-based cassette integration event. In certain embodiments, an integration site and/or the nucleotide sequences flanking an integration site can be identified by brute force random integration screening. In certain embodiments, an integration site and/or the nucleotide sequences flanking an integration site can be determined by conventional sequencing approaches such as target locus amplification (TLA) followed by next-generation sequencing (NGS) and whole-genome NGS. In certain embodiments, the location of an integration site on a chromosome can be determined by conventional cell biology approaches such as fluorescence in-situ hybridization (FISH) analysis.

[0108] In certain embodiments, a TI host cell comprises a first exogenous nucleotide sequence integrated at a first integration site within a specific first locus in the genome of the TI host cell and a second exogenous nucleotide sequence integrated at a second integration site within a specific second locus in the genome. In certain embodiments, a TI host cell comprises multiple exogenous nucleotide sequences integrated at multiple integration sites in the genome of the TI host cell.

[0109] In certain embodiments, the TI host cells of the present disclosure comprise at least two distinct exogenous nucleotide sequences, e.g., exogenous nucleotide sequences comprising at least one RRS. In certain embodiments, the two or more exogenous nucleotide sequences can be targeted for the introduction of one or more SOIs. In certain embodiments the SOIs are the same. In certain embodiments, the SOIs are distinct. In certain embodiments, a parental TI host cell comprising a first exogenous nucleotide sequence can comprise a second exogenous nucleotide sequence at an integration site that is different from the integration site of the first exogenous nucleotide sequence.

[0110] In certain embodiments, the integration site is at least about 50%, at least about 60%, at least about 70%, at least about 80%, at least about 90%, at least about 95%, at least about 99%, or at least about 99.9% homologous to a sequence selected from SEQ ID Nos. 1-7. In certain embodiments, the integration sites can be on the same chromosome. In certain embodiments, the integration sites are located within 1-1,000 nucleotides, 1,000-100,000 nucleotides, 100,000-1,000,000 nucleotides or more from each other in the same chromosome. In certain embodiments the integration sites are on different chromosomes. In certain embodiments, a TI host cell comprising an exogenous nucleotide sequence at one integration site can be used for the insertion of at least two, at least three, at least four, at least five, at least six, at least 7, at least 8, or more exogenous nucleotide sequences at the same or different integration sites.

[0111] In certain embodiments, the feasibility of recombinase-mediated cassette exchange (RMCE) of at least two integration sites can be evaluated for each site individually. In certain embodiments, the feasibility of RMCE at least two integration sites can be evaluated simultaneously. The feasibility of RMCE at multiple sites can evaluated by methods known in the art, e.g., measuring the polypeptide titer, or the polypeptide specific production. In certain embodiments, the evaluation can be performed by methods known in the art, e.g., by evaluating the titer and/or specific productivity of a culture of the TI host cell expressing the SOI(s). Exemplary culture strategies include, but are not limited to, fed-batch shake flask cultures and a bioreactor fed-batch cultures. Titer and specific productivity of the TI host cells expressing a polypeptide of interest can evaluated by methods known in the art, e.g., but not limited to, ELISA, FACS, Fluorometric Microvolume Assay Technology (FMAT), protein-A affinity chromatography, Western blot analysis.

### 3. Exogenous Nucleotide Sequences

[0112] An exogenous nucleotide sequence is a nucleotide sequence that does not originate from a host cell but can be introduced into a host cell by traditional DNA delivery methods, e.g., by transfection, electroporation, or transformation methods. In certain embodiments, the exogenous nucleotide sequence is a sequence of interest (SOI), e.g., a nucleotide sequence encoding a polypeptide of interest. In certain embodiments, however, the exogenous nucleotide sequences employed in the context of the instant disclosure comprises elements, e.g., one or more recombination recognition sequences (RRs) and one or more selection markers, which facilitate the introduction of additional nucleic acid sequences, e.g., SOIs. In certain embodiments, the exogenous nucleotide sequences facilitating the introduction of additional nucleic acid sequences are referred to herein as “landing pads.” Accordingly, in certain embodiments, a TI host cell can comprise: (1) an exogenous nucleotide sequence that includes one or more SOIs, e.g., an SOI incorporated into a particular locus in a host cell genome via an exogenous site-specific nuclease mediated (e.g., CRISPR/Cas9-mediated) targeted integration; (2) an exogenous nucleotide sequence that includes one or more landing pads; or (3) an exogenous nucleotide sequence that includes one or more landing pads into which one or more SOIs have been incorporated.

[0113] In certain embodiments, a TI host cell comprises at least one exogenous nucleotide sequence integrated at one or more integration sites in the genome of the TI host cell. In certain embodiments, the exogenous nucleotide sequence is integrated at one or more integration sites within a specific a locus of the genome of the TI host cell. For example, but not by way of limitation, at least one exogenous nucleic acid sequence can be integrated at one or more locus having least about 50%, at least about 60%, at least about 70%, at least about 80%, at least about 90%, at least about 95%, at least about 99%, or at least about 99.9% homologous to a sequence selected from SEQ ID Nos. 1-7.

### 3.1 Landing Pads

[0114] In certain embodiments, an integrated exogenous nucleotide sequence comprises one or more recombination recognition sequence (RRS), wherein the RRS can be recognized by a recombinase. In certain embodiments, the integrated exogenous nucleotide sequence comprises at least two RRSs. In certain embodiments, the integrated exogenous nucleotide sequence comprises two RRSs and the two RRSs are the same. In certain embodiments, the integrated exogenous nucleotide sequence comprises two RRSs and the two RRSs are heterospecific, i.e., not recognized by the same recombinase. In certain embodiments, an integrated exogenous nucleotide sequence comprises three RRSs, wherein the third RRS is located between the first and the second RRS. In certain embodiments, the first and the second RRS are the same and the third RRS is different from the first or the second RRS. In certain embodiments, all three RRSs are heterospecific. In certain embodiments, an integrated exogenous nucleotide sequence comprises four, five, six, seven, or eight RRSs. In certain embodiments, an integrated exogenous nucleotide sequence comprises multiple RRSs. In certain embodiments, the multiple two or more RRSs are the same. In certain embodiments, the two or more RRSs are heterospecific. In certain embodiments each RRS can be recognized by a distinct recombinase. In certain embodiments, the subset of the total number of RRSs are the homospecific, i.e., recognized by the same recombinase, and a subset of the total number of RRSs are heterospecific, i.e., not recognized by the same recombinase. In certain embodiments, the RRS or RRSs can be selected from the group consisting of a LoxP sequence, a LoxP L3 sequence, a LoxP 2L sequence, a LoxFas sequence, a Lox511 sequence, a Lox2272 sequence, a Lox2372 sequence, a Lox5171 sequence, a Loxm2 sequence, a Lox71 sequence, a Lox66 sequence, a FRT sequence, a Bxb1 attP sequence, a Bxb1 attB sequence, a φC31 attP sequence, and a φC31 attB sequence.

[0115] In certain embodiments, the integrated exogenous nucleotide sequence comprises at least one selection marker. In certain embodiments, the integrated exogenous nucleotide sequence comprises one RRS and at least one selection marker. In certain embodiments, the integrated exogenous nucleotide sequence comprises a first and a second RRS, and at least one selection marker. In certain embodiments, a selection marker is located between the first and the second RRS. In certain embodiments, two RRSs flank at least one selection marker, i.e., a first RRS is located 5′ upstream and a second RRS is located 3′ downstream of the selection marker. In certain embodiments, a first RRS is adjacent to the 5′ end of the selection marker and a second RRS is adjacent to the 3′ end of the selection marker.

[0116] In certain embodiments, a selection marker is located between a first and a second RRS and the two flanking RRSs are the same. In certain embodiments, the two RRSs flanking the selection marker are both LoxP sequences. In certain embodiments, the two RRSs flanking the selection marker are both FRT sequences. In certain embodiments, a selection marker is located between a first and a second RRS and the two flanking RRSs are heterospecific. In certain embodiments, the first flanking RRS is a LoxP L3 sequence and the second flanking RRS is a LoxP 2L sequence. In certain embodiments, a LoxP L3 sequenced is located 5′ of the selection marker and a LoxP 2L sequence is located 3′ of the selection marker. In certain embodiments, the first flanking RRS is a wild-type FRT sequence and the second flanking RRS is a mutant FRT sequence. In certain embodiments, the first flanking RRS is a Bxb1 attP sequence and the second flanking RRS is a Bxb1 attB sequence. In certain embodiments, the first flanking RRS is a φC31 attP sequence and the second flanking RRS is a φC31 attB sequence. In certain embodiments, the two RRSs are positioned in the same orientation. In certain embodiments, the two RRSs are both in the forward or reverse orientation. In certain embodiments, the two RRSs are positioned in opposite orientation.

[0117] In certain embodiments, a selection marker can be an aminoglycoside phosphotransferase (APH) (e.g., hygromycin phosphotransferase (HYG), neomycin and G418 APH), dihydrofolate reductase (DHFR), thymidine kinase (TK), glutamine synthetase (GS), asparagine synthetase, tryptophan synthetase (indole), histidinol dehydrogenase (histidinol D), and genes encoding resistance to puromycin, blasticidin, bleomycin, phleomycin, chloramphenicol, Zeocin, or mycophenolic acid. In certain embodiments, a selection marker can be a GFP, an eGFP, a synthetic GFP, a YFP, an eYFP, a CFP, an mPlum, an mCherry, a tdTomato, an mStrawberry, a J-red, a DsRed-monomer, an mOrange, an mKO, an mCitrine, a Venus, a YPet, an Emerald, a CyPet, an mCFPm, a Cerulean, or a T-Sapphire marker. In certain embodiments, the selection marker can be a fusion construct comprising at least two selection markers. In certain embodiments the gene encoding a selection marker or a fragment of the selection marker can be fused to the gene encoding a different selection marker or a fragment thereof.

[0118] In certain embodiments, the integrated exogenous nucleotide sequence comprises two selection markers flanked by two RRSs, wherein a first selection marker is different from a second selection marker. In certain embodiments, the two selection markers are both selected from the group consisting of a glutamine synthetase selection marker, a thymidine kinase selection marker, a HYG selection marker, and a puromycin resistance selection marker. In certain embodiments, the integrated exogenous nucleotide sequence comprises a thymidine kinase selection marker and a HYG selection marker. In certain embodiments, the first selection maker is selected from the group consisting of an aminoglycoside phosphotransferase (APH) (e.g., hygromycin phosphotransferase (HYG), neomycin and G418 APH), dihydrofolate reductase (DHFR), thymidine kinase (TK), glutamine synthetase (GS), asparagine synthetase, tryptophan synthetase (indole), histidinol dehydrogenase (histidinol D), and genes encoding resistance to puromycin, blasticidin, bleomycin, phleomycin, chloramphenicol, Zeocin, and mycophenolic acid, and the second selection maker is selected from the group consisting of a GFP, an eGFP, a synthetic GFP, a YFP, an eYFP, a CFP, an mPlum, an mCherry, a tdTomato, an mStrawberry, a J-red, a DsRed-monomer, an mOrange, an mKO, an mCitrine, a Venus, a YPet, an Emerald, a CyPet, an mCFPm, a Cerulean, and a T-Sapphire marker. In certain embodiments, the first selection marker is a glutamine synthetase selection marker and the second selection marker is a GFP marker. In certain embodiments, the two RRSs flanking both selection markers are the same. In certain embodiments, the two RRSs flanking both selection markers are different.

[0119] In certain embodiments, the selection marker is operably linked to a promoter sequence. In certain embodiments, the selection marker is operably linked to an SV40 promoter. In certain embodiments, the selection marker is operably linked to a Cytomegalovirus (CMV) promoter.

[0120] In certain embodiments, the integrated exogenous nucleotide sequence comprises at least one selection marker and an IRES, wherein the IRES is operably linked to the selection marker. In certain embodiments, the selection marker operably linked to the IRES is selected from the group consisting of a GFP, an eGFP, a synthetic GFP, a YFP, an eYFP, a CFP, an mPlum, an mCherry, a tdTomato, an mStrawberry, a J-red, a DsRed-monomer, an mOrange, an mKO, an mCitrine, a Venus, a YPet, an Emerald, a CyPet, an mCFPm, a Cerulean, and a T-Sapphire marker. In certain embodiments, the selection marker operably linked to the IRES is a GFP marker. In certain embodiments, the integrated exogenous nucleotide sequence comprises an IRES and two selection markers flanked by two RRSs, wherein the IRES is operably linked to the second selection marker. In certain embodiments, the integrated exogenous nucleotide sequence comprises an IRES and three selection markers flanked by two RRSs, wherein the IRES is operably linked to the third selection marker. In certain embodiments, the integrated exogenous nucleotide sequence comprises an IRES and three selection markers flanked by two RRSs, wherein the IRES is operably linked to the third selection marker. In certain embodiments, the third selection marker is different from the first or the second selection marker. In certain embodiments, the integrated exogenous nucleotide sequence comprises a first selection marker operably linked to a promoter and a second selection marker operably linked to an IRES. In certain embodiments, the integrated exogenous nucleotide sequence comprises a glutamine synthetase selection marker operably linked to a SV40 promoter and a GFP selection marker operably linked to an IRES. In certain embodiments, the integrated exogenous nucleotide sequence comprises a thymidine kinase selection marker and a HYG selection marker operably linked to a CMV promoter and a GFP selection marker operably linked to an IRES.

[0121] In certain embodiments, the integrated exogenous nucleotide sequence comprises three RRSs. In certain embodiments, the third RRS is located between the first and the second RRS. In certain embodiments, all three RRSs are the same. In certain embodiments, the first and the second RRS are the same, and the third RRS is different from the first or the second RRS. In certain embodiments, all three RRSs are heterospecific.

### 3.2 Sequences of Interest (SOIs)

[0122] In certain embodiments, the integrated exogenous nucleotide sequence comprises at least one exogenous SOI. In certain embodiments, the integrated exogenous nucleotide sequence comprises at least one selection marker and at least one exogenous SOI. In certain embodiments, the integrated exogenous nucleotide sequence comprises at least one selection marker, at least one exogenous SOI, and at least one RRS. In certain embodiments, the integrated exogenous nucleotide sequence comprises at least one, at least two, at least three, at least four, at least five, at least six, at least seven, at least eight or more SOIs. In certain embodiments the SOIs are the same. In certain embodiments, the SOIs are different.

[0123] In certain embodiments the SOI encodes a single chain antibody or fragment thereof. In certain embodiments, the SOI encodes an antibody heavy chain sequence or fragment thereof. In certain embodiments, the SOI encodes an antibody light chain sequence or fragment thereof. In certain embodiments, an integrated exogenous nucleotide sequence comprises an SOI encoding an antibody heavy chain sequence or fragment thereof and an SOI encoding an antibody light chain sequence or fragment thereof. In certain embodiments, an integrated exogenous nucleotide sequence comprises an SOI encoding a first antibody heavy chain sequence or fragment thereof, an SOI encoding a second antibody heavy chain sequence or fragment thereof, and an SOI encoding an antibody light chain sequence or fragment thereof. In certain embodiments, an integrated exogenous nucleotide sequence comprises an SOI encoding a first antibody heavy chain sequence or fragment thereof, an SOI encoding a second antibody heavy chain sequence or fragment thereof, an SOI encoding a first antibody light chain sequence or fragment thereof and a second SOI encoding an antibody light chain sequence or fragment thereof. In certain embodiments, the number of SOIs encoding for heavy and light chain sequences can be selected to achieve a desired expression level of the heavy and light chain polypeptides, e.g., to achieve a desired amount of bispecific antibody production. In certain embodiments, the individual SOIs encoding heavy and light chain sequences can be integrated, e.g., into a single exogenous nucleic acid sequence present at a single integration site, into multiple exogenous nucleic acid sequences present at a single integration site, or into multiple exogenous nucleic acid sequences integrated at distinct integration sites within the TI host cell.

[0124] In certain embodiments, the integrated exogenous nucleotide sequence comprises at least one selection marker, at least one exogenous SOI, and one RRS. In certain embodiments, the RRS is located adjacent to at least one selection marker or at least one exogenous SOI. In certain embodiments, the integrated exogenous nucleotide sequence comprises at least one selection marker, at least one exogenous SOI, and two RRSs. In certain embodiments, the integrated exogenous nucleotide sequence comprises at least one selection marker and at least one exogenous SOI located between the first and the second RRS. In certain embodiments, the two RRSs flanking the selection marker and the exogenous SOI are the same. In certain embodiments, the two RRSs flanking the selection marker and the exogenous SOI are different. In certain embodiments, the first flanking RRS is a LoxP L3 sequence and the second flanking RRS is a LoxP 2L sequence. In certain embodiments, a L3 LoxP sequenced is located 5′ of the selection marker and the exogenous SOI, and a LoxP 2L sequence is located 3′ of the selection marker and the exogenous SOI.

[0125] In certain embodiments, the integrated exogenous nucleotide sequence comprises three RRSs and two exogenous SOIs, and the third RRS is located between the first and the second RRS. In certain embodiments, the first SOI is located between the first and the third RRS, and the second SOI is located between the third and the second RRS. In certain embodiments, the first and the second SOI are different. In certain embodiments, the first and the second RRS are the same and the third RRS is different from the first or the second RRS. In certain embodiments, all three RRSs are heterospecific. In certain embodiments, the first RRS is a LoxP L3 site, the second RRS is a LoxP 2L site, and the third RRS is a LoxFas site. In certain embodiments, the integrated exogenous nucleotide sequence comprises three RRSs, one exogenous SOI, and one selection marker. In certain embodiments, the SOI is located between the first and the third RRS, and the selection marker is located between the third and the second RRS. In certain embodiments, the integrated exogenous nucleotide sequence comprises three RRSs, two exogenous SOIs, and one selection marker. In certain embodiments, the first SOI and the selection marker are located between the first and the third RRS, and the second SOI is located between the third and the second RRS.

[0126] In certain embodiments, the exogenous SOI encodes a polypeptide of interest. Such polypeptides of interest can be selected from the group including, but not limited to, an antibody, an enzyme, a cytokine, a growth factor, a hormone, a viral protein, a bacterial protein, a vaccine protein, or a protein with therapeutic function. In certain embodiments, the exogenous SOI encodes an antibody or an antigen-binding fragment thereof. In certain embodiments, the exogenous SOI encodes a single chain antibody, an antibody light chain, an antibody heavy chain, a single-chain Fv fragment (scFv), or an Fc fusion protein. In certain embodiments, the exogenous SOI (or SOIs) encodes a standard antibody. In certain embodiments, the exogenous SOI (or SOIs) encodes a half-antibody, for example, but not limited to, antibodies B, Q, T and mAb I of the present disclosure. In certain embodiments, the exogenous SOI (or SOIs) encodes a complex antibody. In certain embodiments, the complex antibody can be a bispecific antibody, for example, but not limited to, Bispecific Molecule A, Bispecific Molecule B, Bispecific Molecule C, or Bispecific Molecule D of the present disclosure. In certain embodiments, the exogenous SOI is operably linked to at least one cis-acting element, for example, a promoter or an enhancer. In certain embodiments, the exogenous SOI is operably linked to a CMV promoter.

[0127] In certain embodiments, the integrated exogenous nucleotide sequence comprises two RRSs and at least two exogenous SOIs located between the two RRSs. In certain embodiments, SOIs encoding one heavy chain and one light chain of an antibody are located between the two RRSs. In certain embodiments, SOIs encoding one heavy chain and two light chains of an antibody are located between the two RRSs. In certain embodiments, SOIs encoding different combinations of copies of heavy chain and light chain of an antibody are located between the two RRSs.

[0128] In certain embodiments, the integrated exogenous nucleotide sequence comprises three RRSs and at least two exogenous SOIs, and the third RRS is located between the first and the second RRS. In certain embodiments, at least one SOI is located between the first and the third RRS, and at least one SOI is located between the third and the second RRS. In certain embodiments, the first and the second RRS are the same and the third RRS is different from the first or the second RRS. In certain embodiments, all three RRSs are heterospecific. In certain embodiments, SOIs encoding one heavy chain and one light chain of a first antibody are located between the first and the third RRS, and SOIs encoding one heavy chain and one light chain of a second antibody are located between the third and the second RRS. In certain embodiments, SOIs encoding one heavy chain and two light chains of a first antibody are located between the first and the third RRS, and SOIs encoding one heavy chain and one light chain of a second antibody are located between the third RRS and the second RRS. In certain embodiments, SOIs encoding one heavy chain and three light chains of a first antibody are located between the first and the third RRS, and SOIs encoding one light chain of the first antibody and one heavy chain and one light chain of a second antibody are located between the third RRS and the second RRS. In certain embodiments, SOIs encoding one heavy chain and three light chains of a first antibody are located between the first and the third RRS, and SOIs encoding two light chains of the first antibody and one heavy chain and one light chain of a second antibody are located between the third RRS and the second RRS. In certain embodiments, SOIs encoding different combinations of copies of heavy chains and light chains of multiple antibodies are located between the first and the third RRS, and between the third and the second RRS.

[0129] In certain embodiments, the number of SOIs is selected to increase the titer and/or specific productivity of the host cells expressing the SOIs. For example, but not by way of limitation, the incorporation of two, three, four, five, six, seven, eight, or more SOIs can result in increased titer and/or specific productivity.

[0130] In the context of antibody expression, the inclusion of an additional heavy or light chain encoding SOIs can result in increased titer and/or specific productivity. For example, but not by way of limitation, when increasing copy number from one heavy chain and one light chain (HL) to one heavy chain and two light chain encoding sequences (HLL), an increase in titer and/or specific productivity can be achieved. Similarly, as outlined in the examples below, increasing from HLL (three SOIs) to HLL-HL (five SOIs) or HLL-HLL (six SOIs) can provide for an increase in titer and/or specific productivity. Additionally, increasing copy number to HLL-HL (five SOIs) or HLL-HLHL (seven SOIs) can provide for an increase in titer and/or specific productivity. Additional options for heavy and light chain SOI copy numbers include, but are not limited to HHL; HHL-H; HLL-H; HHL-HH; HHL-HL; HHL-LL; HLL-HH; HLL-HL; HLL-LL; HHL-HHL; HHL-HHH; HHL-HLL; HHK-LLL; HLL-HHL; HLL-HHH; HLL-LLL; HHL-HHHL; HHL-HHHH; HHL-HHLL; HHL-HLLL; HHL-LLLL; HLL-HHHL; HLL-HHHH; HLL-HLLL; and HLL-LLLL. In certain embodiments, the inclusion of additional copies occurs at a single genomic locus, while in certain embodiments the SOI copies can be integrated at two or more loci, e.g., multiple copies can be integrated at a single locus and one or more copies integrated at one or more additional loci.

[0131] In certain embodiments, the position of the SOIs, e.g., whether one SOI is located 3′ or 5′ relative to another SOI, is selected to increase the titer and/or specific productivity of the host cells expressing the SOIs. For example, but not by way of limitation, in the context of antibody production, the integrated position of heavy and light chain SOIs can result in increased titer and/or specific productivity. As outlined in FIGS. 23A-D and the examples presented below, the relative position of heavy and light chain SOIs can impact the titer and specific productivity, despite no change in SOI copy number.

### 4. Host Cells

[0132] The presently disclosed subject matter provides a host cell suitable for targeted integration of nucleotide sequences and expression of polypeptides of interest. In certain embodiments, a host cell comprises an endogenous gene selected from the group consisting of LOC107977062, LOC100768845, ITPR2, ERE67000.1, UBAP2, MTMR2, XP_003512331.2 and sequences at least 50% homologous thereto, or a locus of the genome of the host cell, wherein the locus comprises a nucleotide sequence that is selected from the group consisting of SEQ ID Nos. 1-7 and sequences at least 50% homologous thereto.

[0133] In certain embodiments, a host cell is a eukaryotic host cell. In certain embodiments, a host cell is a mammalian host cell. In certain embodiments, a host cell is a hamster host cell, a human host cell, a rat host cell, or a mouse host cell. In certain embodiments, a host cell is a Chinese hamster ovary (CHO) host cell, a CHO K1 host cell, a CHO K1SV host cell, a DG44 host cell, a DUKXB-11 host cell, a CHOK1S host cell, or a CHO KIM host cell.

[0134] In certain embodiments, a host cell is selected from the group consisting of monkey kidney CV1 line transformed by SV40 (COS-7), human embryonic kidney line (293 or 293 cells as described, e.g., in Graham et al., J. Gen Virol. 36:59 (1977)), baby hamster kidney cells (BHK), mouse sertoli cells (TM4 cells as described, e.g., in Mather, Biol. Reprod. 23:243-251 (1980)), monkey kidney cells (CV1), African green monkey kidney cells (VERO-76), human cervical carcinoma cells (HELA), canine kidney cells (MDCK; buffalo rat liver cells (BRL 3A), human lung cells (W138), human liver cells (Hep G2), mouse mammary tumor (MMT 060562), TRI cells, as described, e.g., in Mather et al., Annals N.Y. Acad. Sci. 383:44-68 (1982), MRC 5 cells, FS4 cells, YO cells, NSO cells, Sp2/0 cells, and PER.C6® cells.

[0135] In certain embodiments, a host cell is a cell line. In certain embodiments, a host cell is a cell line that has been cultured for a certain number of generations. In certain embodiments, a host cell is a primary cell.

[0136] In certain embodiments, expression of a polypeptide of interest is stable if the expression level is maintained at certain levels, increases, or decreases less than 20%, over 10, 20, 30, 50, 100, 200, or 300 generations. In certain embodiments, expression of a polypeptide of interest is stable if the culture can be maintained without any selection. In certain embodiments, expression of a polypeptide of interest is high if the polypeptide product of the gene of interest reaches about 1 g/L, about 2 g/L, about 3 g/L, about 4 g/L, about 5 g/L, about 10 g/L, about 12 g/L, about 14 g/L, or about 16 g/L.

[0137] The presently disclosed subject matter also relates to a method for producing a polypeptide of interest. In certain embodiments, such method comprises: a) providing a host cell comprising at least one exogenous SOI and at least one selection marker flanked by two RRSs integrated within a locus of the genome of the host cell, wherein the locus is at least about 90% homologous to a sequence selected from SEQ ID Nos. 1-7; and b) culturing the cell in a) under conditions suitable for expressing the SOI and recovering a polypeptide of interest therefrom. In certain embodiments, such method comprises: a) providing a host cell comprising at least two exogenous SOIs and at least one selection marker integrated within a locus of the genome of the host cell, wherein the locus is at least about 90% homologous to a sequence selected from SEQ ID Nos. 1-7, wherein at least one exogenous SOI and one selection marker is flanked by a first and a third RRS and at least one exogenous SOI is flanked by a second and the third RRS; and b) culturing the cell in a) under conditions suitable for expressing the SOI and recovering a polypeptide of interest therefrom. In certain embodiments, such method comprises: a) providing a host cell comprising at least one exogenous SOI and at least one selection marker flanked by two RRSs integrated within an endogenous gene selected from the group consisting of LOC107977062, LOC100768845, ITPR2, ERE67000.1, UBAP2, MTMR2, XP_003512331.2, and at least about 90% homologous sequences thereof; and b) culturing the cell in a) under conditions suitable for expressing the SOI and recovering a polypeptide of interest therefrom. In certain embodiments, such method comprises: a) providing a host cell comprising at least two exogenous SOIs and at least one selection marker integrated within an endogenous gene selected from the group consisting of LOC107977062, LOC100768845, ITPR2, ERE67000.1, UBAP2, MTMR2, XP_003512331.2, and sequences at least about 90% homologous thereto, wherein at least one exogenous SOI and one selection marker is flanked by a first and a third RRS and at least one exogenous SOI is flanked by a second and the third RRS; and b) culturing the cell in a) under conditions suitable for expressing the SOI and recovering a polypeptide of interest therefrom.

[0138] In certain embodiments, polypeptide of interest is produced and secreted into the cell culture medium. In certain embodiments, polypeptide of interest is expressed and retained within the host cell. In certain embodiments, polypeptide of interest is expressed, inserted into, and retained in the host cell membrane.

[0139] Exogenous nucleotides of interest or vectors can be introduced into a host cell by conventional cell biology methods including, but not limited to, transfection, transduction, electroporation, or injection. In certain embodiments, exogenous nucleotides of interest or vectors are introduced into a host cell by chemical based transfection methods comprising lipid-based transfection method, calcium phosphate-based transfection method, cationic polymer-based transfection method, or nanoparticle-based transfection. In certain embodiments, exogenous nucleotides of interest are introduced into a host cell by virus-mediated transduction including, but not limited to, lentivirus, retrovirus, adenovirus, or adeno-associated virus-mediated transduction. In certain embodiments, exogenous nucleotides of interest or vectors are introduced into a host cell via gene gun-mediated injection. In certain embodiments, both DNA and RNA molecules are introduced into a host cell using methods described herein.

### 5. Targeted Integration

[0140] A targeted integration allows for exogenous nucleotide sequences to be integrated into one or more pre-determined sites of a host cell genome. In certain embodiments, the targeted integration is mediated by a recombinase that recognizes one or more RRSs. In certain embodiments, the targeted integration is mediated by homologous recombination. In certain embodiments, the targeted integration is mediated by an exogenous site-specific nuclease followed by HDR and/or NHEJ.

### 5.1. Targeted Integration Via Recombinase-Mediated Recombination

[0141] A “recombination recognition sequence” (RRS) is a nucleotide sequence recognized by a recombinase and is necessary and sufficient for recombinase-mediated recombination events. A RRS can be used to define the position where a recombination event will occur in a nucleotide sequence.

[0142] In certain embodiments, a RRS is selected from the group consisting of a LoxP sequence, a LoxP L3 sequence, a LoxP 2L sequence, a LoxFas sequence, a Lox511 sequence, a Lox2272 sequence, a Lox2372 sequence, a Lox5171 sequence, a Loxm2 sequence, a Lox71 sequence, a Lox66 sequence, a FRT sequence, a Bxb1 attP sequence, a Bxb1 attB sequence, a φC31 attP sequence, and a φC31 attB sequence.

[0143] In certain embodiments, a RRS can be recognized by a Cre recombinase. In certain embodiments, a RRS can be recognized by a FLP recombinase. In certain embodiments, a RRS can be recognized by a Bxb1 integrase. In certain embodiments, a RRS can be recognized by a φC31 integrase.

[0144] In certain embodiments when the RRS is a LoxP site, the host cell requires the Cre recombinase to perform the recombination. In certain embodiments when the RRS is a FRT site, the host cell requires the FLP recombinase to perform the recombination. In certain embodiments when the RRS is a Bxb1 attP or a Bxb1 attB site, the host cell requires the Bxb1 integrase to perform the recombination. In certain embodiments when the RRS is a φC31 attP or a φC31attB site, the host cell requires the φC31 integrase to perform the recombination. The recombinases can be introduced into a host cell using an expression vector comprising coding sequences of the enzymes.

[0145] The Cre-LoxP site-specific recombination system has been widely used in many biological experimental systems. Cre is a 38-kDa site-specific DNA recombinase that recognizes 34 bp LoxP sequences. Cre is derived from bacteriophase P1 and belongs to the tyrosine family site-specific recombinase. Cre recombinase can mediate both intra and intermolecular recombination between LoxP sequences. The LoxP sequence is composed of an 8 bp nonpalindromic core region flanked by two 13 bp inverted repeats. Cre recombinase binds to the 13 bp repeat thereby mediating recombination within the 8 bp core region. Cre-LoxP-mediated recombination occurs at a high efficiency and does not require any other host factors. If two LoxP sequences are placed in the same orientation on the same nucleotide sequence, Cre-mediated recombination will excise DNA sequences located between the two LoxP sequences as a covalently closed circle. If two LoxP sequences are placed in an inverted position on the same nucleotide sequence, Cre-mediated recombination will invert the orientation of the DNA sequences located between the two sequences. LoxP sequences can also be placed on different chromosomes to facilitate recombination between different chromosomes. If two LoxP sequences are on two different DNA molecules and if one DNA molecule is circular, Cre-mediated recombination will result in integration of the circular DNA sequence.

[0146] In certain embodiments, a LoxP sequence is a wild-type LoxP sequence. In certain embodiments, a LoxP sequence is a mutant LoxP sequence. Mutant LoxP sequences have been developed to increase the efficiency of Cre-mediated integration or replacement. In certain embodiments, a mutant LoxP sequence is selected from the group consisting of a LoxP L3 sequence, a LoxP 2L sequence, a LoxFas sequence, a Lox511 sequence, a Lox2272 sequence, a Lox2372 sequence, a Lox5171 sequence, a Loxm2 sequence, a Lox71 sequence, and a Lox66 sequence. For example, the Lox71 sequence has 5 bp mutated in the left 13 bp repeat. The Lox66 sequence has 5 bp mutated in the right 13 bp repeat. Both the wild-type and the mutant LoxP sequences can mediate Cre-dependent recombination.

[0147] The FLP-FRT site-specific recombination system is similar to the Cre-Lox system. It involves the flippase (FLP) recombinase, which is derived from the 2 μm plasmid of the yeast Saccharomyces cerevisiae. FLP also belongs to the tyrosine family site-specific recombinase. The FRT sequence is a 34 bp sequence that consists of two palindromic sequences of 13 bp each flanking an 8 bp spacer. FLP binds to the 13 bp palindromic sequences and mediates DNA break, exchange and ligation within the 8 bp spacer. Similar to the Cre recombinase, the position and orientation of the two FRT sequences determine the outcome of FLP-mediated recombination. In certain embodiments, a FRT sequence is a wild-type FRT sequence. In certain embodiments, a FRT sequence is a mutant FRT sequence. Both the wild-type and the mutant FRT sequences can mediate FLP-dependent recombination. In certain embodiments, a FRT sequence is fused to a responsive receptor domain sequence, such as, but not limited to, a tamoxifen responsive receptor domain sequence.

[0148] Bxb1 and φC31 belong to the serine recombinase family. They are both derived from bacteriophages and are used by these bacteriophages to establish lysogeny to facilitate site-specific integration of the phage genome into the bacterial genome. These integrases catalyze site-specific recombination events between short (40-60 bp) DNA substrates termed attP and attB sequences that are originally attachment sites located on the phage DNA and bacterial DNA, respectively. After recombination, two new sequences are formed, which are termed attL and attR sequences and each contains half sequences derived from attP and attB. Recombination can also occur between attL and attR sequences to excise the integrated phage out of the bacterial DNA. Both integrases can catalyze the recombination without the aid of any additional host factors. In the absence of any accessory factors, these integrases mediate unidirectional recombination between attP and attB with greater than 80% efficiency. Because of the short DNA sequences that can be recognized by these integrases and the unidirectional recombination, these recombination systems have been developed as a complement to the widely-used Cre-LoxP and FRT-FLP systems for genetic engineering purposes.

[0149] The terms “matching RRSs” and “homospecific RRSs” indicates that a recombination occurs between two RRSs. In certain embodiments, the two matching RRSs are the same. In certain embodiments, both RRSs are wild-type LoxP sequences. In certain embodiments, both RRSs are mutant LoxP sequences. In certain embodiments, both RRSs are wild-type FRT sequences. In certain embodiments, both RRSs are mutant FRT sequences. In certain embodiments, the two matching RRSs are different sequences but can be recognized by the same recombinase. In certain embodiments, the first matching RRS is a Bxb1 attP sequence and the second matching RRS is a Bxb1 attB sequence. In certain embodiments, the first matching RRS is a φC31 attB sequence and the second matching RRS is a φC31 attB sequence.

[0150] In certain embodiments, an integrated exogenous nucleotide sequence comprises two RRSs and a vector comprises two RRSs matching the two RRSs on the integrated exogenous nucleotide sequence, i.e., the first RRS on the integrated exogenous nucleotide sequence matches the first RRS on the vector and the second RRS on the integrated exogenous nucleotide sequence matches the second RRS on the vector. In certain embodiments, the first RRS on the integrated exogenous nucleotide sequence and the first RRS on the vector are the same as the second RRS on the integrated exogenous nucleotide sequence and the second RRS on the vector. A non-limiting example of such a “single-vector RMCE” strategy is presented in FIG. 2A. In certain embodiments, the first RRS on the integrated exogenous nucleotide sequence and the first RRS on the vector are different from the second RRS on the integrated exogenous nucleotide sequence and the second RRS on the vector. In certain embodiments, the first RRS on the integrated exogenous nucleotide sequence and the first RRS on the vector are both LoxP L3 sequences, and the second RRS on the integrated exogenous nucleotide sequence and the second RRS on the vector are both LoxP 2L sequences.

[0151] In certain embodiments, a “two-vector RMCE” strategy is employed. For example, but not by way of limitation, an integrated exogenous nucleotide sequence could comprise three RRSs, e.g., an arrangement where the third RRS (“RRS3”) is present between the first RRS (“RRS1”) and the second RRS (“RRS2”), while a first vector comprises two RRSs matching the first and the third RRS on the integrated exogenous nucleotide sequence, and a second vector comprises two RRSs matching the third and the second RRS on the integrated exogenous nucleotide sequence. An example of a two vector RMCE strategy is illustrated in FIG. 4. In such an example, RRS1, RRS2, and RRS3 are heterospecific, e.g., they do not cross-react with each other. In some embodiments, one vector (front) comprises the RRS1, a first SOI and a promoter followed by a start codon and RRS3 (in this order). The other vector (back) comprises the RRS3 fused to the coding sequence of a marker without the start codon (ATG), an SOI 2 and the RRS2 (in this order). Additional nucleotides may be inserted between the RRS3 site and the selection marker sequence to ensure in frame translation for the fusion protein. In some embodiments, the first SOI encodes an antibody. In some embodiments, the antibody is a single chain antibody, an antibody light chain, an antibody heavy chain, a single-chain Fv fragment (scFv), or an Fc fusion protein. In some embodiments, the second SOI encodes an antibody. In some embodiments, the antibody is a single chain antibody, an antibody light chain, an antibody heavy chain, a single-chain Fv fragment (scFv), or an Fc fusion protein. In certain embodiments the antibodies encoded by the first and second SOIs pair to form a multispecific, e.g., bispecific antibody.

[0152] Such two vector RMCE strategies allow for the introduction of eight or more SOIs by incorporating the appropriate number of SOIs between each pair of RRSs.

[0153] Both single-vector and two-vector RMCE allow for unidirectional integration of one or more donor DNA molecule(s) into a pre-determined site of a host cell genome, and precise exchange of a DNA cassette present on the donor DNA with a DNA cassette on the host genome where the integration site resides. The DNA cassettes are characterized by two heterospecific RRSs flanking at least one selection marker (although in certain two-vector RMCE examples a “split selection marker” can be used as outlined herein) and/or at least one exogenous SOI. RMCE involves double recombination cross-over events, catalyzed by a recombinase, between the two heterospecific RRSs within the target genomic locus and the donor DNA molecule. RMCE is designed to introduce a copy of the SOI or selection marker into the pre-determined locus of a host cell genome. Unlike recombination which involves just one cross-over event, RMCE can be implemented such that prokaryotic vector sequences are not introduced into the host cell genome, thus reducing and/or preventing unwanted triggering of host immune or defense mechanisms. The RMCE procedure can be repeated with multiple DNA cassettes.

[0154] In certain embodiments, targeted integration is achieved by one cross-over recombination event, wherein one exogenous nucleotide sequence comprising one RRS adjacent to at least one exogenous SOI or at least one selection marker is integrated into a pre-determined site of a host cell genome. In certain embodiments, targeted integration is achieved by one RMCE, wherein a DNA cassette comprising at least an exogenous SOI or at least one selection marker flanked by two heterospecific RRSs is integrated into a pre-determined site of a host cell genome. In certain embodiments, targeted integration is achieved by two RMCEs, wherein two different DNA cassettes, each comprising at least an exogenous SOI or at least one selection marker flanked by two heterospecific RRSs, are both integrated into a pre-determined site of a host cell genome. In certain embodiments, targeted integration is achieved by multiple RMCEs, wherein DNA cassettes from multiple vectors, each comprising at least an exogenous SOI or at least one selection marker flanked by two heterospecific RRSs, are all integrated into a pre-determined site of a host cell genome. In certain embodiments the selection marker can be partially encoded on the first the vector and partially encoded on the second vector such that the integration of both RMCEs allows for the expression of the selection marker. An example of such a system is presented in FIG. 4.

[0155] In certain embodiments, targeted integration via recombinase-mediated recombination leads to a selection marker or one or more exogenous SOI integrated into one or more pre-determined integration sites of a host cell genome along with sequences from a prokaryotic vector. In certain embodiments, targeted integration via recombinase-mediated recombination leads to selection marker or one or more exogenous SOI integrated into one or more pre-determined integration sites of a host cell genome free of sequences from a prokaryotic vector.

### 5.2 Targeted Integration Via Homologous Recombination, HDR, or NHEJ

[0156] The presently disclosed subject matter also relates to targeted integration mediated by homologous recombination or by an exogenous site-specific nuclease followed by HDR or NHEJ.

[0157] Homologous recombination is a recombination between DNA molecules that share extensive sequence homology. It can be used to direct error-free repair of double-stranded DNA breaks and generates sequence variation in gametes during meiosis. Since homologous recombination involves the exchange of genetic information between two homologous DNA molecules, it does not alter the overall arrangement of the genes on a chromosome. During homologous recombination, a nick or break forms in double-stranded DNA (dsDNA), followed by the invasion of a homologous dsDNA molecule by a single-stranded DNA end, pairing of homologous sequences, branch migration to form a Holliday junction, and final resolution of the Holliday junction.

[0158] Double-strand break (DSB) is the most severe form of DNA damage and repair of such DNA damage is essential for the maintenance of genome integrity in all organisms. There are two major repair pathways to repair DSBs. The first repair pathway is homology-directed repair (HDR) pathway and homologous recombination is the most common form of HDR. Since HDR requires the presence of homologous DNA present in the cell, this repair pathway is normally active in S and G2 phase of the cell cycle wherein newly replicated sister chromatids are available as homologous templates. HDR is also a major repair pathway to repair collapsed replication forks during DNA replication. HDR is considered as a relatively error-free repair pathway. The second repair pathway for DSBs is non-homologous end joining (NHEJ). NHEJ is a repair pathway wherein the ends of a broken DNA are ligated together without the requirement for a homologous DNA template.

[0159] Targeted integration can be facilitated by exogenous site-specific nucleases followed by HDR. This is due to that the frequency of homologous recombination can be increased by introducing a DSB at a specific target genomic site. In certain embodiments, an exogenous nuclease can be selected from the group consisting of a zinc finger nuclease (ZFN), a ZFN dimer, a transcription activator-like effector nuclease (TALEN), a TAL effector domain fusion protein, an RNA-guided DNA endonuclease, an engineered meganuclease, and a clustered regularly interspaced short palindromic repeats (CRISPR)-associated (Cas) endonuclease.

[0160] CRISPR/Cas and TALEN systems are two genome editing tools that offer the best ease of construction and high efficiency. CRISPR/Cas was identified as an immune defense mechanism of bacteria against invading bacteriophages. Cas is a nuclease that, when guided by a synthetic guide RNA (gRNA), is capable of associating with a specific nucleotide sequence in a cell and editing the DNA in or around that nucleotide sequence, for instance by making one or more of a single-strand break, a DSB, and/or a point mutation. TALEN is an engineered site-specific nuclease, which is composed of the DNA-binding domain of TALE (transcription activator-like effectors) and the catalytic domain of restriction endonuclease FokI. By changing the amino acids present in the highly variable residue region of the monomers of the DNA binding domain, different artificial TALENs can be created to target various nucleotides sequences. The DNA binding domain subsequently directs the nuclease to the target sequences and creates a DSB.

[0161] Targeted integration via homologous recombination or HDR involves the presence of homologous sequences to the integration site. In certain embodiments, the homologous sequences are present on a vector. In certain embodiments, the homologous sequences are present on a polynucleotide.

[0162] In certain embodiments, a vector for targeted integration of exogenous nucleotide sequences into a host cell comprises nucleotide sequences homologous to an endogenous gene selected from the group consisting of LOC107977062, LOC100768845, ITPR2, ERE67000.1, UBAP2, MTMR2, and XP_003512331.2, or to a sequence selected from SEQ ID Nos. 1-7 flanking at least one selection marker. In certain embodiments, a vector for targeted integration of exogenous nucleotide sequences into a host cell comprises nucleotide sequences homologous to an endogenous gene selected from the group consisting of LOC107977062, LOC100768845, ITPR2, ERE67000.1, UBAP2, MTMR2, and XP_003512331.2, or to a sequence selected from SEQ ID Nos. 1-7 flanking at least one selection marker and at least one exogenous SOI. In certain embodiments, a vector for targeted integration of exogenous nucleotide sequences into a host cell comprises nucleotide sequences at least 50% homologous to a sequence selected from SEQ ID Nos. 1-7 flanking a DNA cassette, wherein the DNA cassette comprises at least one selection marker and at least one exogenous SOI flanked by two RRSs. In certain embodiments, a vector for targeted integration of exogenous nucleotide sequences into a host cell comprises nucleotide sequences at least 50% homologous to an endogenous gene selected from the group consisting of LOC107977062, LOC100768845, ITPR2, ERE67000.1, UBAP2, MTMR2, and XP_003512331.2 flanking a DNA cassette, wherein the DNA cassette comprises at least one selection marker and at least one exogenous SOI flanked by two RRSs. In certain embodiments, the vector nucleotide sequences are at least about 50%, at least about 60%, at least about 70%, at least about 80%, at least about 90%, at least about 95%, at least about 99%, or at least about 99.9% homologous to an endogenous gene selected from the group consisting of LOC107977062, LOC100768845, ITPR2, ERE67000.1, UBAP2, MTMR2, and XP_003512331.2, or to a sequence selected from SEQ ID Nos. 1-7. In certain embodiments, the vector is selected from the group consisting of an adenovirus vector, an adeno-associated virus vector, a lentivirus vector, a retrovirus vector, an integrating phage vector, a non-viral vector, a transposon and/or transposase vector, an integrase substrate, and a plasmid.

[0163] In certain embodiments, a polynucleotide for targeted integration of exogenous nucleotide sequences into a host cell comprises nucleotide sequences homologous to an endogenous gene selected from the group consisting of LOC107977062, LOC100768845, ITPR2, ERE67000.1, UBAP2, MTMR2, and XP_003512331.2, or to a sequence selected from SEQ ID Nos. 1-7 flanking at least one selection marker. In certain embodiments, a polynucleotide for targeted integration of exogenous nucleotide sequences into a host cell comprises nucleotide sequences homologous to an endogenous gene selected from the group consisting of LOC107977062, LOC100768845, ITPR2, ERE67000.1, UBAP2, MTMR2, and XP_003512331.2, or to a sequence selected from SEQ ID Nos. 1-7 flanking at least one selection marker and at least one exogenous SOI. In certain embodiments, a polynucleotide for targeted integration of exogenous nucleotide sequences into a host cell comprises nucleotide sequences at least 50% homologous to a sequence selected from SEQ ID Nos. 1-7 flanking a DNA cassette, wherein the DNA cassette comprises at least one selection marker and at least one exogenous SOI flanked by two RRSs. In certain embodiments, a polynucleotide for targeted integration of exogenous nucleotide sequences into a host cell comprises nucleotide sequences at least 50% homologous to an endogenous gene selected from the group consisting of LOC107977062, LOC100768845, ITPR2, ERE67000.1, UBAP2, MTMR2, and XP_003512331.2 flanking a DNA cassette, wherein the DNA cassette comprises at least one selection marker and at least one exogenous SOI flanked by two RRSs. In certain embodiments, the flanking nucleotide sequences are at least about 50%, at least about 60%, at least about 70%, at least about 80%, at least about 90%, at least about 95%, at least about 99%, or at least about 99.9% homologous to an endogenous gene selected from the group consisting of LOC107977062, LOC100768845, ITPR2, ERE67000.1, UBAP2, MTMR2, and XP_003512331.2, or to a sequence selected from SEQ ID Nos. 1-7.

[0164] In certain embodiments, homologous recombination is carried out without any accessory factors. In certain embodiments, homologous recombination is facilitated by the presence of vectors that are capable of integration. In certain embodiments, an integrating vector is selected from the group consisting of an adeno-associated virus vector, a lentivirus vector, a retrovirus vector, and an integrating phage vector.

### 5.3 Regulated Targeted Integration

[0165] There are many cases where protein expression levels are not optimal mainly because the encoded proteins are difficult-to-express. The low expression level of difficult-to-express proteins can have diverse and difficult to identify causes. One possibility is the toxicity of the expressed proteins in the host cells. In such cases, a regulated expression system can be used to express toxic proteins where the sequences of interest encoding the proteins are under the control of an inducible promoter. In these systems, expression of the difficult-to-express proteins is only prompted when a regulator, e.g., small molecule, such as, but not limited to, tetracycline or its analogue, doxycycline (DOX), is added to the culture. Regulating the expression of toxic proteins could alleviate the toxic effects, allowing the cultures to achieve the desired cell growth prior to production. In certain embodiments, a regulated target integration (RTI) system comprises a SOI that is integrated into a specific locus, e.g., an exogenous nucleic acid sequence comprising one or more RRSs, and is transcribed under a regulated promoter operably linked thereto. In certain embodiments, an RTI system can be used to determine the underlying causes of low protein expression for a difficult-to-express molecule, such as, but not limited to, an antibody. In certain embodiments, the ability to selectively turn off the expression of a SOI in an RTI system can be used to link expression of a SOI to an observed adverse effect.

[0166] In certain embodiments, to minimize transcriptional and cell line variability effects during the root cause analysis of difficult-to-express molecules, a regulated target integration (RTI) system can be used. For example, but not by way of limitation, the expression of the SOI in a TI host can be triggered by addition to the culture of a regulator, e.g., doxycycline. In certain embodiments, the RTI vector utilizes a tetracycline-regulated promoter to express the SOI, which can be integrated into, e.g., an exogenous nucleic acid sequence comprising an RRS, which is itself integrated into an integration site in the host cell's genome, allowing for regulated expression of the SOI.

[0167] In certain embodiments, the RTI system described in the present disclosure can be used to successfully determine the underlying cause(s) of low protein expression of an SOI, e.g., a therapeutic antibody, as compared to control cell line. In certain embodiments, once the lower relative expression of a SOI, e.g., a therapeutic antibody, in a RTI cell line is confirmed, the intracellular accumulation and secretion levels of the SOI can be evaluated by leveraging protein translation inhibitor treatments, e.g., Dox and cycloheximide.

### 5.4 Regulated Systems

[0168] The presently disclosed subject matter also relates to regulated systems for use in TI. For example, but not by way limitation, such regulation can be based on gene switches for blocking or activating mRNA synthesis by regulated coupling of transcriptional repressors or activators to constitutive or minimal promoters. In certain non-limiting embodiments, repression can be achieved by binding the repressor proteins, e.g., where the proteins sterically block transcriptional initiation, or by actively repressing transcription through transcriptional silencers. In certain non-limiting embodiments, activation of mammalian or viral enhancerless minimal promoters can be achieved by the regulated coupling to an activation domain.

[0169] In certain embodiments, the conditional coupling of transcriptional repressors or activators can be achieved by using allosteric proteins that bind the promoters in response to external stimuli. In certain embodiments, the conditional coupling of transcriptional repressors or activators can be achieved by using intracellular receptors that are released from sequestrating proteins and, thus, can bind target promoters. In certain embodiments, the conditional coupling of transcriptional repressors or activators can be achieved by using chemically induced dimerizers.

[0170] In certain embodiments, the allosteric proteins used in the TI systems of the present disclosure can be proteins that modulate transcriptional activity in response to antibiotics, bacterial quorum-sensing messengers, catabolites, or to the cultivation parameters, such as temperature, e.g. cold or heat. In certain embodiments, such RTI systems can be catabolite-based, e.g., where a bacterial repressor that controls catabolic genes for alternative carbon sources has been transferred to mammalian cells. In certain embodiments, the repression of the target promoter can be achieved by cumate-responsive binding of the repressor CymR. In certain embodiments, the catabolite-based system can rely on the activation of chimeric promoters by 6-hydroxynicotine-responsive binding of the prokaryotic repressor HdnoR, fused to the Herpes simplex VP16 transactivation domain.

[0171] In certain embodiments the TI system can be a quorum-sensing-based expression system originated from prokaryotes that manage intra- and inter-population communication by quorum-sensing molecules. These quorum-sensing molecules bind to receptors in target cells, modulate the receptors' affinity to cognate promoters leading to the initiation of specific regulon switches. In certain embodiments, the quorum-sensing molecule can be the N-(3-oxo-octanoyl)-homoserine lactone in the presence of which, the TraR-p65 fusion protein activates expression from a minimal promoter fused to the TraR-specific operator sequence. In certain embodiments, the quorum-sensing molecule can be the butyrolactone SCB1 (racemic 2-(1′-hydroxy-6-methylheptyl)-3-(hydroxymethyl)-butanolide) in a system based on the Streptomyces coelicolor A3 (2) ScbR repressor that binds its cognate operator OScbR in the absence of the SCB1. In certain embodiments, the quorum-sensing molecule can be homoserine-derived inducers used in a RTI system wherein Pseudomonas aeruginosa quorum-sensing repressors RhlR and LasR are fused to the SV40 T-antigen nuclear localization sequence and the Herpes simplex VP16 domain and can activate promoters containing specific operator sequences (las boxes).

[0172] In certain embodiments, the inducing molecules that modulate the allosteric proteins used in the RTI systems of the present disclosure can be, but are not limited to, cumate, isopropyl-β-D-galactopyranoside (IPTG), macrolides, 6-hydroxynicotine, doxycycline, streptogramins, NADH, tetracycline.

[0173] In certain embodiments, the intracellular receptors used in the RTI systems of the present disclosure can be cytoplasmic or nuclear receptors. In certain embodiments, the RTI systems of the present disclosure can utilize the release of transcription factors from sequestering and inhibiting proteins by using small molecules. In certain embodiments, the RTI systems of the present disclosure can rely on steroid-regulation, wherein a hormone receptor is fused to a natural or an artificial transcription factor that can be released from HSP90 in the cytosol, migrate into the nucleus and activate selected promoters. In certain embodiments, mutant receptors can be used that are regulated by synthetic steroid analogs in order to avoid crosstalk by endogenous steroid hormones. In certain embodiments the receptors can be an estrogen receptor variant responsive to 4-hydroxytamoxifen or a progesterone-receptor mutant inducible by RU486. In certain embodiments, the nuclear receptor-derived rosiglitazone-responsive transcription switch based on the human nuclear peroxisome proliferator-activated receptor γ (PPARγ) can be used in the RTI systems of the present disclosure. In certain embodiments, a variant of steroid-responsive receptors can be the RheoSwitch, that is based on a modified Choristoneura fumiferana ecdysone receptor and the mouse retinoid X receptor (RXR) fused to the Gal4 DNA binding domain and the VP16 trans-activator. In the presence of synthetic ecdysone, the RheoSwitch variant can bind and activate a minimal promoter fused to several repeats of the Gal4-response element.

[0174] In certain embodiments, the RTI systems disclosed herein can utilize chemically induced dimerization of a DNA-binding protein and a transcriptional activator for the activation of a minimal core promoter fused with a cognate operator. In certain embodiments, the RTI systems disclosed herein can utilize the rapamycin-regulated dimerization of FKBP with FRB. In this system the FRB is fused to the p65 trans-activator and FKBP is fused to a zinc finger domain specific for cognate operator sites placed upstream of an engineered minimal interleukin-12 promoter. In certain embodiments, the FKBP can be mutated. In certain embodiments, the RTI systems disclosed herein can utilize bacterial gyrase B subunit (GyrB), where GyrB dimerizes in the presence of the antibiotic coumermycin and dissociates with novobiocin.

[0175] In certain embodiments, the RTI systems of the present disclosure can be used for regulated siRNA expression. In certain embodiments, the regulated siRNA expression system can be a tetracycline, a macrolide, or an OFF- and ON-type QuoRex system. In certain embodiments, the RTI system can utilize a Xenopus terminal oligopyrimidine element (TOP), which blocks translational initiation by forming hairpin structures in the 5′ untranslated region.

[0176] In certain embodiments, the RTI systems described in the present disclosure can utilize gas-phase controlled expression, e.g., acetaldehyde-induced regulation (AIR) system. The AIR system can employ the Aspergillus nidulans AlcR transcription factor, which specifically activates the PAIR promoter assembled from AlcR-specific operators fused to the minimal human cytomegalovirus promoter in the presence of gaseous or liquid acetaldehyde at nontoxic concentrations.

[0177] In certain embodiments, the RTI systems of the present disclosure can utilize a Tet-On or a Tet-Off system. In such systems, expression of a one or more SOIs can be regulated by tetracycline or its analogue, doxycycline.

[0178] In certain embodiments, the RTI system of the present disclosure can utilize a PIP-on or a PIP-off system. In such systems, the expression of SOIs can be regulated by, e.g., pristinamycin, tetracycline and/or erythromycin.

### 6. Preparation and Use of TI Host Cells

[0179] The presently disclosed subject matter relates to methods for the targeted integration of exogenous nucleotide sequences into a host cell. In certain embodiments, the methods relate to the integration of an exogenous nucleotide sequence into a host cell to produce a host cell suitable for subsequent targeted integration of a SOI. In certain embodiments, said methods comprise recombinase-mediated recombination. In certain embodiments, said methods involve homologous recombination, HDR, and/or NHEJ.

### 6. 1 Preparation of TI Host Cells Using Recombinase-Mediated Recombination

[0180] In certain embodiments, the present disclosure provides methods for preparing TI host cells to express a polypeptide of interest comprising: a) providing a TI host cell comprising an exogenous nucleotide sequence integrated at a site within a locus of the genome of the host cell, wherein the locus is at least about 90% homologous to SEQ ID Nos. 1-7, wherein the exogenous nucleotide sequence comprises two RRSs, flanking at least one first selection marker; b) introducing into the cell provided in a) a vector comprising two RRSs matching the two RRSs on the integrated exogenous nucleotide sequence and flanking at least one exogenous SOI and at least one second selection marker; c) introducing a recombinase, wherein the recombinase recognizes the RRSs; and d) selecting for TI cells expressing the second selection marker to thereby isolate a TI host cell expressing the polypeptide of interest.

[0181] In certain embodiments, the present disclosure provides methods for preparing TI host cells to express a polypeptide of interest comprising: a) providing a TI host cell comprising an exogenous nucleotide sequence integrated at a site within an endogenous gene selected from the group consisting of LOC107977062, LOC100768845, ITPR2, ERE67000.1, UBAP2, MTMR2, XP_003512331.2, and at least about 90% homologous sequences thereof, wherein the exogenous nucleotide sequence comprises two RRSs, flanking at least one first selection marker; b) introducing into the cell provided in a) a vector comprising two RRSs matching the two RRSs on the integrated exogenous nucleotide sequence and flanking at least one exogenous SOI and at least one second selection marker; c) introducing a recombinase, wherein the recombinase recognizes the RRSs; and d) selecting for TI cells expressing the second selection marker to thereby isolate a TI host cell expressing the polypeptide of interest.

[0182] In certain embodiments, the present disclosure provides methods for preparing TI host cells to express a polypeptide of interest comprising: a) providing a TI host cell comprising an exogenous nucleotide sequence integrated at a site within a locus of the genome of the TI host cell, wherein the locus is at least about 90% homologous to SEQ ID Nos. 1-7, wherein the exogenous nucleotide sequence comprises a first DNA cassette comprising two heterospecific RRSs, flanking at least one first selection marker; b) introducing into the cell provided in a) a vector comprising a second DNA cassette comprising two heterospecific RRSs matching the two RRSs on the integrated exogenous nucleotide sequence and flanking at least one exogenous SOI and at least one second selection marker; c) introducing a recombinase, wherein the recombinase recognizes the RRSs and performs one RMCE; and d) selecting for TI cells expressing the second selection marker to thereby isolate a TI host cell expressing the polypeptide of interest.

[0183] In certain embodiments, the present disclosure provides methods for preparing TI host cells to express a polypeptide of interest comprising: a) providing a TI host cell comprising an exogenous nucleotide sequence integrated at a site within an endogenous gene selected from the group consisting of LOC107977062, LOC100768845, ITPR2, ERE67000.1, UBAP2, MTMR2, XP_003512331.2, and at least about 90% homologous sequences thereof, wherein the exogenous nucleotide sequence comprises a first DNA cassette comprising two heterospecific RRSs, flanking at least one first selection marker; b) introducing into the cell provided in a) a vector comprising a second DNA cassette comprising two heterospecific RRSs matching the two RRSs on the integrated exogenous nucleotide sequence and flanking at least one exogenous SOI and at least one second selection marker; c) introducing a recombinase, wherein the recombinase recognizes the RRSs and performs one RMCE; and d) selecting for TI cells expressing the second selection marker to thereby isolate a TI host cell expressing the polypeptide of interest.

[0184] In certain embodiments, the present disclosure provides methods for preparing TI host cells to express a first and second polypeptide of interest (where the first and second polypeptides can be the same or different) comprising: a) providing a TI host cell comprising an exogenous nucleotide sequence integrated at a site within a locus of the genome of the host cell, wherein the locus is at least about 90% homologous to SEQ ID Nos. 1-7, wherein the exogenous nucleotide sequence comprises a first and a second RRS flanking at least one first selection marker, and a third RRS located between the first and the second RRS, and all the RRSs are heterospecific; b) introducing into the cell provided in a) a first vector comprising two RRSs matching the first and the third RRS on the integrated exogenous nucleotide sequence and flanking at least one first exogenous SOI and at least one second selection marker; c) introducing into the cell provided in a) a second vector comprising two RRSs matching the second and the third RRS on the integrated exogenous nucleotide sequence and flanking at least one second exogenous SOI; d) introducing one or more recombinases, wherein the one or more recombinases recognize the RRSs; and e) selecting for TI cells expressing the second selection marker to thereby isolate a TI host cell expressing the first and second polypeptides of interest. In certain embodiments, rather than have the entire selection maker on the first vector, the first vector comprises a promoter sequence operably linked to the codon ATG positioned flanked upstream by the first SOI and downstream by an RRS; and the second vector comprises a selection marker lacking an ATG transcription start codon flanked upstream by an RRS and downstream by the second SOI.

[0185] In certain embodiments, the present disclosure provides methods for preparing TI host cells to express a first and second polypeptide of interest (where the first and second polypeptides can be the same or different) comprising: a) providing a TI host cell comprising an exogenous nucleotide sequence integrated at a site within an endogenous gene selected from the group consisting of LOC107977062, LOC100768845, ITPR2, ERE67000.1, UBAP2, MTMR2, XP_003512331.2, and at least about 90% homologous sequences thereof, wherein the exogenous nucleotide sequence comprises a first and a second RRS flanking at least one first selection marker, and a third RRS located between the first and the second RRS, and all the RRSs are heterospecific; b) introducing into the cell provided in a) a first vector comprising two RRSs matching the first and the third RRS on the integrated exogenous nucleotide sequence and flanking at least one first exogenous SOI and at least one second selection marker; c) introducing into the cell provided in a) a second vector comprising two RRSs matching the second and the third RRS on the integrated exogenous nucleotide sequence and flanking at least one second exogenous SOI; d) introducing one or more recombinases, wherein the one or more recombinases recognize the RRSs; and e) selecting for TI cells expressing the second selection marker to thereby isolate a TI host cell expressing the first and second polypeptides of interest. In certain embodiments, rather than have the entire selection maker on the first vector, the first vector comprises a promoter sequence operably linked to the codon ATG positioned flanked upstream by the first SOI and downstream by an RRS; and the second vector comprises a selection marker lacking an ATG transcription start codon flanked upstream by an RRS and downstream by the second SOI.

[0186] In certain embodiments, the present disclosure provides methods for preparing TI host cells to express a first and second polypeptide of interest (where the first and second polypeptides can be the same or different) comprising: a) providing a TI host cell comprising an exogenous nucleotide sequence integrated at a site within a locus of the genome of the host cell, wherein the locus is at least about 90% homologous to SEQ ID Nos. 1-7, wherein the exogenous nucleotide sequence comprises a first DNA cassette comprising a first and a second RRS flanking at least one first selection marker, and a third RRS located between the first and the second RRS, and all three RRSs are heterospecific; b) introducing into the cell provided in a) a first vector comprising a second DNA cassette, wherein the second DNA cassette comprises two heterospecific RRSs matching the first and the third RRS of the first DNA cassette and flanking at least one first exogenous SOI and at least one second selection marker; c) introducing into the cell provided in a) a second vector comprising a third DNA cassette, wherein the third DNA cassette comprises two heterospecific RRSs matching the second and the third RRS of the first DNA cassette and flanking at least one second exogenous SOI; d) introducing one or more recombinases, wherein the one or more recombinases recognize the RRSs and perform two RMCEs; and e) selecting for TI cells expressing the second selection marker to thereby isolate a TI host cell expressing the first and second polypeptides of interest. In certain embodiments, rather than have the entire selection maker on the first vector, the first vector comprises a promoter sequence operably linked to the codon ATG positioned flanked upstream by the first SOI and downstream by an RRS; and the second vector comprises a selection marker lacking an ATG transcription start codon flanked upstream by an RRS and downstream by the second SOI.

[0187] In certain embodiments, the present disclosure provides methods for preparing TI host cells to express a first and second polypeptide of interest (where the first and second polypeptides can be the same or different) comprising: a) providing a TI host cell comprising an exogenous nucleotide sequence integrated at a site within an endogenous gene selected from the group consisting of LOC107977062, LOC100768845, ITPR2, ERE67000.1, UBAP2, MTMR2, XP_003512331.2, and sequences at least about 90% homologous thereto, wherein the exogenous nucleotide sequence comprises a first DNA cassette comprising a first and a second RRS flanking at least one first selection marker, and a third RRS located between the first and the second RRS, and all three RRSs are heterospecific; b) introducing into the cell provided in a) a first vector comprising a second DNA cassette, wherein the second DNA cassette comprises two heterospecific RRSs matching the first and the third RRS of the first DNA cassette and flanking at least one first exogenous SOI and at least one second selection marker; c) introducing into the cell provided in a) a second vector comprising a third DNA cassette, wherein the third DNA cassette comprises two heterospecific RRSs matching the second and the third RRS of the first DNA cassette and flanking at least one second exogenous SOI; d) introducing one or more recombinases, wherein the one or more recombinases recognize the RRSs and perform two RMCEs; and e) selecting for TI cells expressing the second selection marker to thereby isolate a TI host cell expressing the first and second polypeptides of interest. In certain embodiments, rather than have the entire selection maker on the first vector, the first vector comprises a promoter sequence operably linked to the codon ATG positioned flanked upstream by the first SOI and downstream by an RRS; and the second vector comprises a selection marker lacking an ATG transcription start codon flanked upstream by an RRS and downstream by the second SOI.

[0188] In certain embodiments, the present disclosure provides methods for preparing TI host cells to express a polypeptide of interest comprising: a) providing a TI host cell comprising an exogenous nucleotide sequence integrated at a site within a locus of the genome of the host cell, wherein the locus is at least about 90% homologous to a sequence selected from SEQ ID Nos. 1-7, wherein the exogenous nucleotide sequence comprises one RRS adjacent to at least one first selection marker; b) introducing into the cell provided in a) a vector comprising one RRS matching the RRS on the integrated exogenous nucleotide sequence and adjacent to at least one exogenous SOI and at least one second selection marker; c) introducing a recombinase, wherein the recombinase recognizes the RRSs; and d) selecting for TI cells expressing the second selection marker to thereby isolate a TI host cell expressing the polypeptide of interest.

[0189] In certain embodiments, the present disclosure provides methods for preparing TI host cells to express a polypeptide of interest comprising: a) providing a TI host cell comprising an exogenous nucleotide sequence integrated at a site within an endogenous gene selected from the group consisting of LOC107977062, LOC100768845, ITPR2, ERE67000.1, UBAP2, MTMR2, XP_003512331.2, and sequences at least about 90% homologous thereto, wherein the exogenous nucleotide sequence comprises one RRS adjacent to at least one first selection marker; b) introducing into the cell provided in a) a vector comprising one RRS matching the RRS on the integrated exogenous nucleotide sequence and adjacent to at least one exogenous SOI and at least one second selection marker; c) introducing a recombinase, wherein the recombinase recognizes the RRSs; and d) selecting for TI cells expressing the second selection marker to thereby isolate a TI host cell expressing the polypeptide of interest.

[0190] The presently disclosed subject matter also relates to methods of producing a polypeptide of interest comprising: a) providing a TI host cell described herein; b) culturing the TI host cell in a) under conditions suitable for expressing the SOI and recovering a polypeptide of interest therefrom.

[0191] In certain embodiments, the present disclosure provides methods for preparing TI host cells suitable for subsequent targeted integration comprising: a) providing a TI host cell comprising an exogenous nucleotide sequence integrated at a site within a locus of the genome of the host cell, wherein the locus is at least about 90% homologous to a sequence selected from SEQ ID Nos. 1-7, wherein the exogenous nucleotide sequence comprises two RRSs flanking at least one exogenous SOI and at least one first selection marker; b) introducing into the cell provided in a) a vector comprising two RRSs matching the two RRSs on the integrated exogenous nucleotide sequence and flanking at least one second selection marker; c) introducing a recombinase, wherein the recombinase recognizes the RRSs; and d) selecting for TI cells expressing the second selection marker to thereby isolate a TI host cell suitable for subsequent targeted integration.

[0192] In certain embodiments, the present disclosure provides methods for preparing TI host cells suitable for subsequent targeted integration comprising: a) providing a TI host cell comprising an exogenous nucleotide sequence integrated at a site within an endogenous gene selected from the group consisting of LOC107977062, LOC100768845, ITPR2, ERE67000.1, UBAP2, MTMR2, XP_003512331.2, and sequences at least about 90% homologous thereto, wherein the exogenous nucleotide sequence comprises two RRSs flanking at least one exogenous SOI and at least one first selection marker; b) introducing into the cell provided in a) a vector comprising two RRSs matching the two RRSs on the integrated exogenous nucleotide sequence and flanking at least one second selection marker; c) introducing a recombinase, wherein the recombinase recognizes the RRSs; and d) selecting for TI cells expressing the second selection marker to thereby isolate a TI host cell suitable for subsequent targeted integration.

[0193] In certain embodiments, the present disclosure provides methods for preparing TI host cells suitable for subsequent targeted integration comprising: a) providing a TI host cell comprising an exogenous nucleotide sequence integrated at a site within a locus of the genome of the host cell, wherein the locus is at least about 90% homologous to a sequence selected from SEQ ID Nos. 1-7, wherein the exogenous nucleotide sequence comprises a first and a second RRS flanking at least one exogenous SOI and at least one first selection marker; b) introducing into the cell provided in a) a vector comprising three RRSs, wherein the first RRS of the vector matches the first RRS on the integrated exogenous nucleotide sequence, the second RRS of the vector matches the second RRS on the integrated exogenous nucleotide sequence, and at least one second selection marker located between the first and the second RRS; c) introducing a recombinase, wherein the recombinase recognizes the first and the second RRS on both the vector and the integrated exogenous nucleotide sequence; and d) selecting for TI host cells expressing the second selection marker to thereby isolate a TI host cell suitable for subsequence targeted integration.

[0194] In certain embodiments, the present disclosure provides methods for preparing TI host cells suitable for subsequent targeted integration comprising: a) providing a TI host cell comprising an exogenous nucleotide sequence integrated at a site within an endogenous gene selected from the group consisting of LOC107977062, LOC100768845, ITPR2, ERE67000.1, UBAP2, MTMR2, XP_003512331.2, and sequences at least about 90% homologous thereto, wherein the exogenous nucleotide sequence comprises a first and a second RRS flanking at least one exogenous SOI and at least one first selection marker; b) introducing into the cell provided in a) a vector comprising three RRSs, wherein the first RRS of the vector matches the first RRS on the integrated exogenous nucleotide sequence, the second RRS of the vector matches the second RRS on the integrated exogenous nucleotide sequence, and at least one second selection marker located between the first and the second RRS; c) introducing a recombinase, wherein the recombinase recognizes the first and the second RRS on both the vector and the integrated exogenous nucleotide sequence; and d) selecting for TI host cells expressing the second selection marker to thereby isolate a TI host cell suitable for subsequent targeted integration.

### 6.2 Methods for Targeted Modification of a Host Cell Using Homologous Recombination, HDR, or NHEJ

[0195] In certain embodiments, the present disclosure provides methods for preparing TI host cells to express a polypeptide of interest comprising: a) providing a TI host cell comprising a locus of the genome of the host cell, wherein the locus is at least about 90% homologous to SEQ ID Nos. 1-7; b) introducing a vector into the TI host cell, wherein the vector comprises nucleotide sequences at least 50% homologous to a sequence selected from SEQ ID No. 1-7 flanking a DNA cassette, wherein the DNA cassette comprises at least one selection marker and at least one exogenous SOI; c) selecting for the selection marker to isolate a TI host cell with the SOI integrated in the locus of the genome, and expressing the polypeptide of interest. In certain embodiments, the DNA cassette of the vector further comprises at least one selection marker and at least one exogenous SOI flanked by two RRSs.

[0196] In certain embodiments, the present disclosure provides methods for preparing TI host cells to express a polypeptide of interest comprising g: a) providing a TI host cell comprising a locus of the genome of the host cell, wherein the locus is at least about 90% homologous to a sequence selected from SEQ ID Nos. 1-7; b) introducing a polynucleotide into the host cell, wherein the polynucleotide comprises nucleotide sequences at least 50% homologous to a sequence selected from SEQ ID No. 1-7 flanking a DNA cassette, wherein the DNA cassette comprises at least one selection marker and at least one exogenous SOI; c) selecting for the selection marker to isolate a TI host cell with the SOI integrated in the locus of the genome, and expressing the polypeptide of interest. In certain embodiments, the DNA cassette of the vector further comprises at least one selection marker and at least one exogenous SOI flanked by two RRSs.

[0197] In certain embodiments, the homologous recombination is facilitated by an integrating vector. In certain embodiments, a vector is selected from the group consisting of an adenovirus vector, an adeno-associated virus vector, a lentivirus vector, a retrovirus vector, an integrating phage vector, a non-viral vector, a transposon and/or transposase vector, an integrase substrate, and a plasmid. In certain embodiments, the transposon can be a PiggyBac (PB) transposon system.

[0198] In certain embodiments, the integration is promoted by an exogenous nuclease. In certain embodiments, the exogenous nuclease is selected from the group consisting of a zinc finger nuclease (ZFN), a ZFN dimer, a transcription activator-like effector nuclease (TALEN), a TAL effector domain fusion protein, an RNA-guided DNA endonuclease, an engineered meganuclease, and a clustered regularly interspaced short palindromic repeats (CRISPR)-associated (Cas) endonuclease.

[0199] In certain embodiments, the present disclosure provides methods for preparing TI host cells suitable for subsequent targeted integration comprising: a) providing a TI host cell comprising a locus of the genome of the host cell, wherein the locus is at least about 90% homologous to a sequence selected from SEQ ID Nos. 1-7; b) introducing a vector into the TI host cell, wherein the vector comprises nucleotide sequences at least 50% homologous to a sequences selected from SEQ ID Nos. 1-7 flanking a DNA cassette, wherein the DNA cassette comprises at least one selection marker flanked by two RRSs; c) selecting for the selection marker to isolate a TI host cell suitable for subsequent targeted integration.

[0200] In certain embodiments, the present disclosure provides methods for preparing TI host cells suitable for subsequent targeted integration comprising: a) providing a TI host cell comprising a locus of the genome of the host cell, wherein the locus is at least about 90% homologous to a sequence selected from SEQ ID Nos. 1-7; b) introducing a polynucleotide into the TI host cell, wherein the polynucleotide comprises nucleotide sequences at least 50% homologous to a sequence selected from SEQ ID Nos. 1-7 flanking a DNA cassette, wherein the DNA cassette comprises at least one selection marker flanked by two RRSs; c) selecting for the selection marker to isolate a TI host cell suitable for subsequent targeted integration.

[0201] In certain embodiments, the present disclosure provides methods for preparing TI host cells suitable for subsequent targeted integration comprising: a) providing a TI host cell comprising a locus of the genome of the host cell, wherein the locus is at least about 90% homologous to a sequence selected from SEQ ID Nos. 1-7; b) introducing a vector into the host cell, wherein the vector comprises nucleotide sequences at least 50% homologous to a sequence selected from SEQ ID Nos. 1-7 flanking a DNA cassette, wherein the DNA cassette comprises three RRSs, wherein the third RRS and at least one selection marker is located between the first and the second RRS; and c) selecting for the selection marker to isolate a TI host cell suitable for subsequent targeted integration.

[0202] In certain embodiments, the present disclosure provides methods for preparing TI host cells suitable for subsequent targeted integration comprising: a) providing a TI host cell comprising a locus of the genome of the host cell, wherein the locus is at least about 90% homologous to a sequence selected from SEQ ID Nos. 1-7; b) introducing a polynucleotide into the host cell, wherein the polynucleotide comprises nucleotide sequences at least 50% homologous to a sequence selected from SEQ ID Nos. 1-7 flanking a DNA cassette, wherein the DNA cassette comprises three RRSs, wherein the third RRS and at least one selection marker is located between the first and the second RRS; and c) selecting for the selection marker to isolate a TI host cell suitable for subsequent targeted integration.

[0203] In certain embodiments, the present disclosure provides methods for preparing a TI host cell expressing at least one polypeptide of interest comprising: a) providing a TI host cell comprising at least one exogenous nucleotide sequence integrated at a site within one or more loci of the genome of the TI host cell, wherein the one or more loci are at least about 90% homologous to a sequence selected from SEQ ID Nos. 1-7, wherein the at least one exogenous nucleotide sequence comprises two RRSs, flanking at least one first selection marker; b) introducing into the cell provided in a) a vector comprising two RRSs matching the two RRSs on the integrated exogenous nucleotide sequence and flanking at least one exogenous SOI and at least one second selection marker; c) introducing a recombinase or a nucleic acid encoding a recombinase, wherein the recombinase recognizes the RRSs; and selecting for TI cells expressing the second selection marker to thereby isolate a TI host cell expressing the at least one polypeptide of interest.

[0204] In certain embodiments, the present disclosure provides methods for preparing a TI host cell expressing at least one first and second polypeptide of interest (where the first and second polypeptides can be the same or different) comprising: a) providing a TI host cell comprising at least one exogenous nucleotide sequence integrated at a site within one or more loci of the genome of the host cell, wherein one or more loci are at least about 90% homologous to a sequence selected from SEQ ID Nos. 1-7, wherein the exogenous nucleotide sequence comprises a first and a second RRS flanking at least one first selection marker, and a third RRS located between the first and the second RRS, and all the RRSs are heterospecific; b) introducing into the cell provided in a) a first vector comprising two RRSs matching the first and the third RRS on the at least one integrated exogenous nucleotide sequence and flanking at least one first exogenous SOI and at least one second selection marker; c) introducing into the cell provided in a) a second vector comprising two RRSs matching the second and the third RRS on the at least one integrated exogenous nucleotide sequence and flanking at least one second exogenous SOI; d) introducing one or more recombinases, or one or more nucleic acids encoding one or more recombinases, wherein the one or more recombinases recognize the RRSs; and e) selecting for TI cells expressing the second selection marker to thereby isolate a TI host cell expressing the at least one first and second polypeptides of interest. In certain embodiments, rather than have the entire selection maker on the first vector, the first vector comprises a promoter sequence operably linked to the codon ATG positioned flanked upstream by the first SOI and downstream by an RRS; and the second vector comprises a selection marker lacking an ATG transcription start codon flanked upstream by an RRS and downstream by the second SOI.

[0205] In certain embodiments, the present disclosure provides methods for preparing a TI host cell expressing a polypeptide of interest comprising: a) providing a TI host cell comprising at least one exogenous nucleotide sequence integrated at a site within one or more loci of the genome of the TI host cell, wherein the one or more loci are at least about 90% homologous to a sequence selected from SEQ ID Nos. 1-7, wherein the exogenous nucleotide sequence comprises one or more RRSs; b) introducing into the cell provided in a) a vector comprising one or more RRSs matching the one or more RRSs on the integrated exogenous nucleotide sequence and flanking at least one exogenous SOI operably linked to a regulatable promoter; c) introducing a recombinase or a nucleic acid encoding a recombinase, wherein the recombinase recognizes the RRSs; and d) selecting for TI cells expressing the exogenous SOI in the presence of an inducer to thereby isolate a TI host cell expressing the polypeptide of interest.

[0206] In certain embodiments, the present disclosure provides methods for expressing a polypeptide of interest comprising: a) providing a host cell comprising at least one exogenous SOI flanked by two RRSs and a regulatable promoter integrated within a locus of the genome of the host cell, wherein the locus is at least about 90% homologous to a sequence selected from SEQ ID Nos. 1-7; and b) culturing the cell under conditions suitable for expressing the SOI and recovering a polypeptide of interest therefrom.

[0207] In certain embodiments, the present disclosure provides methods for preparing a TI host cell expressing a first and second polypeptide of interest (where the first and second polypeptides can be the same or different) comprising: a) providing a TI host cell comprising an exogenous nucleotide sequence integrated at a site within a locus of the genome of the host cell, wherein the locus is at least about 90% homologous to a sequence selected from SEQ ID Nos. 1-7, wherein the exogenous nucleotide sequence comprises a first, second RRS and a third RRS located between the first and the second RRS, and all the RRSs are heterospecific; b) introducing into the cell provided in a) a first vector comprising two RRSs matching the first and the third RRS on the integrated exogenous nucleotide sequence and flanking at least one first exogenous SOI operably linked to a regulatable promoter; c) introducing into the cell provided in a) a second vector comprising two RRSs matching the second and the third RRS on the integrated exogenous nucleotide sequence and flanking at least one second SOI operably linked to a regulatable promoter; d) introducing one or more recombinases, or one or more nucleic acids encoding one or more recombinases, wherein the one or more recombinases recognize the RRSs; and e) selecting for TI cells expressing the at least first and second exogenous SOIs in the presence of an inducer to thereby isolate a TI host cell expressing the polypeptides of interest. In certain embodiments, rather than have the entire selection maker on the first vector, the first vector comprises a promoter sequence operably linked to the codon ATG positioned flanked upstream by the first SOI and downstream by an RRS; and the second vector comprises a selection marker lacking an ATG transcription start codon flanked upstream by an RRS and downstream by the second SOI.

### 7. Products

[0208] The host cells of the present disclosure can be used for the expression of any molecule of interest, e.g., a polypeptide of interest. In certain embodiments, the host cells of the present disclosure can be used for the expression of polypeptides, e.g., mammalian polypeptides. Non-limiting examples of such polypeptides include hormones, receptors, fusion proteins, regulatory factors, growth factors, complement system factors, enzymes, clotting factors, anti-clotting factors, kinases, cytokines, CD proteins, interleukins, therapeutic proteins, diagnostic proteins and antibodies. In some embodiments, the antibody is a monoclonal antibody. In some embodiments, the antibody is a therapeutic antibody. In some embodiments, the antibody is a diagnostic antibody. In some embodiments, the antibody is a human antibody. In some embodiments, the antibody is a humanized antibody.

[0209] In certain embodiments, examples of polypeptides encompassed within the definition herein include mammalian polypeptides, such as, e.g., renin; a growth hormone, including human growth hormone and bovine growth hormone; growth hormone releasing factor; parathyroid hormone; thyroid stimulating hormone; lipoproteins; alpha-1-antitrypsin; insulin A-chain; insulin B-chain; proinsulin; follicle stimulating hormone; calcitonin; luteinizing hormone; glucagon; leptin; clotting factors such as factor VIIIC, factor IX, tissue factor, and von Willebrands factor; anti-clotting factors such as Protein C; atrial natriuretic factor; lung surfactant; a plasminogen activator, such as urokinase or human urine or tissue-type plasminogen activator (t-PA); bombesin; thrombin; hematopoietic growth factor; tumor necrosis factor-alpha and -beta; a tumor necrosis factor receptor such as death receptor 5 and CD120; TNF-related apoptosis-inducing ligand (TRAIL); B-cell maturation antigen (BCMA); B-lymphocyte stimulator (BLyS); a proliferation-inducing ligand (APRIL); enkephalinase; RANTES (regulated on activation normally T-cell expressed and secreted); human macrophage inflammatory protein (MIP-1-alpha); a serum albumin such as human serum albumin; Muellerian-inhibiting substance; relaxin A-chain; relaxin B-chain; prorelaxin; mouse gonadotropin-associated peptide; a microbial protein, such as beta-lactamase; DNase; IgE; a cytotoxic T-lymphocyte associated antigen (CTLA), such as CTLA-4; inhibin; activin; platelet-derived endothelial cell growth factor (PD-ECGF); a vascular endothelial growth factor family protein (e.g., VEGF-A, VEGF-B, VEGF-C, VEGF-D, and P1GF); a platelet-derived growth factor (PDGF) family protein (e.g., PDGF-A, PDGF-B, PDGF-C, PDGF-D, and dimers thereof); fibroblast growth factor (FGF) family such as aFGF, bFGF, FGF4, and FGF9; epidermal growth factor (EGF); receptors for hormones or growth factors such as a VEGF receptor(s) (e.g., VEGFR1, VEGFR2, and VEGFR3), epidermal growth factor (EGF) receptor(s) (e.g., ErbB1, ErbB2, ErbB3, and ErbB4 receptor), platelet-derived growth factor (PDGF) receptor(s) (e.g., PDGFR-α and PDGFR-β), and fibroblast growth factor receptor(s); TIE ligands (Angiopoietins, ANGPT1, ANGPT2); Angiopoietin receptor such as TIE1 and TIE2; protein A or D; rheumatoid factors; a neurotrophic factor such as bone-derived neurotrophic factor (BDNF), neurotrophin-3, -4, -5, or -6 (NT-3, NT-4, NT-5, or NT-6), or a nerve growth factor such as NGF-b; transforming growth factor (TGF) such as TGF-alpha and TGF-beta, including TGF-B1, TGF-B2, TGF-3, TGF-B4, or TGF-B5; insulin-like growth factor-I and -II (IGF-I and IGF-II); des (1-3)-IGF-I (brain IGF-I), insulin-like growth factor binding proteins (IGFBPs); CD proteins such as CD3, CD4, CD8, CD19 and CD20; erythropoietin; osteoinductive factors; immunotoxins; a bone morphogenetic protein (BMP); a chemokine such as CXCL12 and CXCR4; an interferon such as interferon-alpha,-beta, and -gamma; colony stimulating factors (CSFs), e.g., M-CSF, GM-CSF, and G-CSF; a cytokine such as interleukins (ILs), e.g., IL-1 to IL-10; midkine; superoxide dismutase; T-cell receptors; surface membrane proteins; decay accelerating factor; viral antigen such as, for example, a portion of the AIDS envelope; transport proteins; homing receptors; addressins; regulatory proteins; integrins such as CD11a, CD11b, CD11c, CD18, an ICAM, VLA-4 and VCAM; ephrins; Bv8; Delta-like ligand 4 (DLL4); Del-1; BMP9; BMP10; Follistatin; Hepatocyte growth factor (HGF)/scatter factor (SF); Alk1; Robo4; ESM1; Perlecan; EGF-like domain, multiple 7 (EGFL7); CTGF and members of its family; thrombospondins such as thrombospondin1 and thrombospondin2; collagens such as collagen IV and collagen XVIII; neuropilins such as NRP1 and NRP2; Pleiotrophin (PTN); Progranulin; Proliferin; Notch proteins such as Notch1 and Notch4; semaphorins such as Sema3A, Sema3C, and Sema3F; a tumor associated antigen such as CA125 (ovarian cancer antigen); immunoadhesins; and fragments and/or variants of any of the above-listed polypeptides as well as antibodies, including antibody fragments, binding to one or more protein, including, for example, any of the above-listed proteins.

[0210] In certain embodiments, the polypeptide of interest is a bi-specific, tri-specific or multi-specific polypeptide, e.g. a bi-specific antibody. Various molecular formats for multispecific antibodies are known in the art and are included herein (see e.g., Spiess et al., Mol Immunol 67 (2015) 95-106). A particular type of multispecific antibodies, also included herein, are bispecific antibodies designed to simultaneously bind to a surface antigen on a target cell, e.g., a tumor cell, and to an activating, invariant component of the T cell receptor (TCR) complex, such as CD3, for retargeting of T cells to kill target cells. Other examples of bispecific antibody formats include, but are not limited to, the so-called “BiTE” (bispecific T cell engager) molecules wherein two scFv molecules are fused by a flexible linker (see, e.g., WO 2004/106381, WO 2005/061547, WO 2007/042261, and WO 2008/119567, Nagorsen and Bäuerle, Exp Cell Res 317, 1255-1260 (2011)); diabodies (Holliger et al., Prot Eng 9, 299-305 (1996)) and derivatives thereof, such as tandem diabodies (“TandAb”; Kipriyanov et al., J Mol Biol 293, 41-56 (1999)); “DART” (dual affinity retargeting) molecules which are based on the diabody format but feature a C-terminal disulfide bridge for additional stabilization (Johnson et al., J Mol Biol 399, 436-449 (2010)), and so-called triomabs, which are whole hybrid mouse/rat IgG molecules (reviewed in Seimetz et al., Cancer Treat Rev 36, 458-467 (2010)). Particular T cell bispecific antibody formats included herein are described in WO 2013/026833, WO 2013/026839, WO 2016/020309; Bacac et al., Oncoimmunology 5 (8) (2016) e1203498.

[0211] In certain embodiments, the host cells of the present disclosure can be used for the expression of chaperones, protein modifying enzymes, shRNA, gRNA or other proteins or peptides while expressing a therapeutic protein or molecule of interest constitutively or regulated.

[0212] In some embodiments, the polypeptide expressed by the host cells of the present disclosure may bind to, or interact with, any protein, including, without limitation, cytokines, cytokine-related proteins, and cytokine receptors selected from the group consisting of 8MPI, 8MP2, 8MP38 (GDFIO), 8MP4, 8MP6, 8MP8, CSFI (M-CSF), CSF2 (GM-CSF), CSF3 (G-CSF), EPO, FGF1 (aFGF), FGF2 (BFGF), FGF3 (int-2), FGF4 (HST), FGF5, FGF6 (HST-2), FGF7 (KGF), FGF9, FGF1 0, FGF11, FGF12, FGF12B, FGF14, FGF16, FGF17, FGF19, FGF20, FGF21, FGF23, IGF1, IGF2, IFNA1, IFNA2, IFNA4, IFNA5, IFNA6, IFNA7, IFN81, IFNG, IFNWI, FEL1, FEL1 (EPSELON), FEL1 (ZETA), IL 1A, IL 1B, IL2, IL3, IL4, IL5, IL6, IL7, IL8, IL9, IL1 0, IL 11, IL 12A, IL 12B, IL 13, IL 14, IL 15, IL 16, IL 17, IL 17B, IL 18, IL 19, IL20, IL22, IL23, IL24, IL25, IL26, IL27, IL28A, IL28B, IL29, IL30, PDGFA, PDGFB, TGFA, TGFB1, TGFB2, TGFBb3, LTA (TNF-β), LTB, TNF (TNF-α), TNFSF4 (OX40 ligand), TNFSF5 (CD40 ligand), TNFSF6 (FasL), TNFSF7 (CD27 ligand), TNFSF8 (CD30 ligand), TNFSF9 (4-1 BB ligand), TNFSF10 (TRAIL), TNFSF11 (TRANCE), TNFSF12 (APO3L), TNFSF13 (April), TNFSF13B, TNFSF14 (HVEM-L), TNFSF15 (VEGI), TNFSF18, HGF (VEGFD), VEGF, VEGFB, VEGFC, IL1R1, IL1R2, IL1RL1, IL1RL2, IL2RA, IL2RB, IL2RG, IL3RA, IL4R, IL5RA, IL6R, IL7R, IL8RA, IL8RB, IL9R, IL10RA, IL10RB, IL 11RA, IL12RB1, IL12RB2, IL13RA1, IL13RA2, IL15RA, IL17R, IL18R1, IL20RA, IL21R, IL22R, IL1HY1, IL1RAP, IL1RAPL1, IL1RAPL2, IL1RN, IL6ST, IL18BP, IL18RAP, IL22RA2, AIF1, HGF, LEP (leptin), PTN, and THPO.k.

[0213] In some embodiments, the polypeptide expressed by the host cells of the present disclosure may bind to, or interact with, a chemokine, chemokine receptor, or a chemokine-related protein selected from the group consisting of CCLI (1-309), CCL2 (MCP-1/MCAF), CCL3 (MIP-Iα), CCL4 (MIP-IB), CCL5 (RANTES), CCL7 (MCP-3), CCL8 (mcp-2), CCL11 (eotaxin), CCL 13 (MCP-4), CCL 15 (MIP-18), CCL 16 (HCC-4), CCL 17 (TARC), CCL 18 (PARC), CCL 19 (MDP-3b), CCL20 (MIP-3a), CCL21 (SLC/exodus-2), CCL22 (MDC/STC-1), CCL23 (MPIF-1), CCL24 (MPIF-2/eotaxin-2), CCL25 (TECK), CCL26 (eotaxin-3), CCL27 (CTACK/ILC), CCL28, CXCLI (GROI), CXCL2 (GR02), CXCL3 (GR03), CXCL5 (ENA-78), CXCL6 (GCP-2), CXCL9 (MIG), CXCL 10 (IP 10), CXCL 11 (1-TAC), CXCL 12 (SDFI), CXCL 13, CXCL 14, CXCL 16, PF4 (CXCL4), PPBP (CXCL7), CX3CL 1 (SCYDI), SCYEI, XCLI (lymphotactin), XCL2 (SCM-IB), BLRI (MDR15), CCBP2 (D6/JAB61), CCRI (CKRI/HM145), CCR2 (mcp-IRB IRA), CCR3 (CKR3/CMKBR3), CCR4, CCR5 (CMKBR5/ChemR13), CCR6 (CMKBR6/CKR-L3/STRL22/DRY6), CCR7 (CKR7/EBII), CCR8 (CMKBR8/TER1/CKR-L1), CCR9 (GPR-9-6), CCRL1 (VSHK1), CCRL2 (L-CCR), XCR1 (GPR5/CCXCR1), CMKLR1, CMKOR1 (RDC1), CX3CR1 (V28), CXCR4, GPR2 (CCR10), GPR31, GPR81 (FKSG80), CXCR3 (GPR9/CKR-L2), CXCR6 (TYMSTR/STRL33/Bonzo), HM74, IL8RA (IL8Ra), IL8RB (IL8RB), LTB4R (GPR16), TCP10, CKLFSF2, CKLFSF3, CKLFSF4, CKLFSF5, CKLFSF6, CKLFSF7, CKLFSF8, BDNF, C5, C5R1, CSF3, GRCC10 (C10), EPO, FY (DARC), GDF5, HDF1, HDFla, DL8, PRL, RGS3, RGS13, SDF2, SLIT2, TLR2, TLR4, TREM1, TREM2, and VHL. In some embodiments, the polypeptide expressed by the host cells of the present disclosure may bind to, or interact with, 0772P (CA125, MUC16) (i.e., ovarian cancer antigen), ABCF1; ACVR1; ACVR1B; ACVR2; ACVR2B; ACVRL1; ADORA2A; Aggrecan; AGR2; AICDA; AIF1; AIG1; AKAP1; AKAP2; AMH; AMHR2; amyloid beta; ANGPTL; ANGPT2; ANGPTL3; ANGPTL4; ANPEP; APC; APOC1; AR; ASLG659; ASPHD1 (aspartate beta-hydroxylase domain containing 1; LOC253982); AZGP1 (zinc-a-glycoprotein); B7.1; B7.2; BAD; BAFF-R (B cell-activating factor receptor, BLyS receptor 3, BR3; BAG1; BAI1; BCL2; BCL6; BDNF; BLNK; BLRI (MDR15); BMP1; BMP2; BMP3B (GDF10); BMP4; BMP6; BMP8; BMPR1A; BMPRIB (bone morphogenic protein receptor-type IB); BMPR2; BPAG1 (plectin); BRCA1; Brevican; C19orf10 (IL27w); C3; C4A; C5; C5R1; CANT1; CASP1; CASP4; CAV1; CCBP2 (D6/JAB61); CCL1 (1-309); CCL11 (eotaxin); CCL13 (MCP-4); CCL15 (MIP18); CCL16 (HCC-4); CCL17 (TARC); CCL18 (PARC); CCL19 (MIP-3B); CCL2 (MCP-1); MCAF; CCL20 (MIP-3a); CCL21 (MTP-2); SLC; exodus-2; CCL22 (MDC/STC-1); CCL23 (MPIF-1); CCL24 (MPIF-2/eotaxin-2); CCL25 (TECK); CCL26 (eotaxin-3); CCL27 (CTACK/ILC); CCL28; CCL3 (MTP-Ia); CCL4 (MDP-IB); CCL5 (RANTES); CCL7 (MCP-3); CCL8 (mcp-2); CCNA1; CCNA2; CCND1; CCNE1; CCNE2; CCR1 (CKRI/HM145); CCR2 (mcp-IRB/RA); CCR3 (CKR/CMKBR3); CCR4; CCR5 (CMKBR5/ChemR13); CCR6 (CMKBR6/CKR-L3/STRL22/DRY6); CCR7 (CKBR7/EBI1); CCR8 (CMKBR8/TER1/CKR-L1); CCR9 (GPR-9-6); CCRL1 (VSHK1); CCRL2 (L-CCR); CD164; CD19; CD1C; CD20; CD200; CD22 (B-cell receptor CD22-B isoform); CD24; CD28; CD3; CD37; CD38; CD3E; CD3G; CD3Z; CD4; CD40; CD40L; CD44; CD45RB; CD52; CD69; CD72; CD74; CD79A (CD79a, immunoglobulin-associated alpha, a B cell-specific protein); CD79B; CDS; CD80; CD81; CD83; CD86; CDH1 (E-cadherin); CDH10; CDH12; CDH13; CDH18; CDH19; CDH20; CDH5; CDH7; CDH8; CDH9; CDK2; CDK3; CDK4; CDK5; CDK6; CDK7; CDK9; CDKN1A (p21/WAF1/Cip1); CDKNIB (p27/Kip1); CDKNIC; CDKN2A (P16INK4a); CDKN2B; CDKN2C; CDKN3; CEBPB; CER1; CHGA; CHGB; Chitinase; CHST10; CKLFSF2; CKLFSF3; CKLFSF4; CKLFSF5; CKLFSF6; CKLFSF7; CKLFSF8; CLDN3; CLDN7 (claudin-7); CLL-1 (CLEC12A, MICL, and DCAL2); CLN3; CLU (clusterin); CMKLR1; CMKOR1 (RDC1); CNR1; COL 18A1; COL1A1; COL4A3; COL6A1; complement factor D; CR2; CRP; CRIPTO (CR, CR1, CRGF, CRIPTO, TDGF1, teratocarcinoma-derived growth factor); CSFI (M-CSF); CSF2 (GM-CSF); CSF3 (GCSF); CTLA4; CTNNB1 (b-catenin); CTSB (cathepsin B); CX3CL1 (SCYDI); CX3CR1 (V28); CXCL1 (GRO1); CXCL10 (IP-10); CXCL11 (I-TAC/IP-9); CXCL12 (SDF1); CXCL13; CXCL14; CXCL16; CXCL2 (GRO2); CXCL3 (GRO3); CXCL5 (ENA-78/LIX); CXCL6 (GCP-2); CXCL9 (MIG); CXCR3 (GPR9/CKR-L2); CXCR4; CXCR5 (Burkitt's lymphoma receptor 1, a G protein-coupled receptor); CXCR6 (TYMSTR/STRL33/Bonzo); CYB5; CYC1; CYSLTR1; DAB2IP; DES; DKFZp451J0118; DNCLI; DPP4; E16 (LAT1, SLC7A5); E2F1; ECGF1; EDG1; EFNA1; EFNA3; EFNB2; EGF; EGFR; ELAC2; ENG; ENO1; ENO2; ENO3; EPHB4; EphB2R; EPO; ERBB2 (Her-2); EREG; ERK8; ESR1; ESR2; ETBR (Endothelin type B receptor); F3 (TF); FADD; FasL; FASN; FCERIA; FCER2; FCGR3A; FcRH1 (Fc receptor-like protein 1); FcRH2 (IFGP4, IRTA4, SPAP1A (SH2 domain containing phosphatase anchor protein 1a), SPAP1B, SPAPIC); FGF; FGF1 (aFGF); FGF10; FGF11; FGF12; FGF12B; FGF13; FGF14; FGF16; FGF17; FGF18; FGF19; FGF2 (bFGF); FGF20; FGF21; FGF22; FGF23; FGF3 (int-2); FGF4 (HST); FGF5; FGF6 (HST-2); FGF7 (KGF); FGF8; FGF9; FGFR; FGFR3; FIGF (VEGFD); FEL1 (EPSILON); FILI (ZETA); FLJ12584; FLJ25530; FLRTI (fibronectin); FLT1; FOS; FOSL1 (FRA-1); FY (DARC); GABRP (GABAa); GAGEB1; GAGEC1; GALNAC4S-6ST; GATA3; GDF5; GDNF-Ral (GDNF family receptor alpha 1; GFRA1; GDNFR; GDNFRA; RETL1; TRNR1; RET1L; GDNFR-alpha1; GFR-ALPHA-1); GEDA; GFI1; GGT1; GM-CSF; GNASI; GNRHI; GPR2 (CCR10); GPR19 (G protein-coupled receptor 19; Mm.4787); GPR31; GPR44; GPR54 (KISS1 receptor; KISS1R; GPR54; HOT7T175; AXOR12); GPR81 (FKSG80); GPR172A (G protein-coupled receptor 172A; GPCR41; FLJ11856; D15Ertd747e); GRCCIO (C10); GRP; GSN (Gelsolin); GSTP1; HAVCR2; HDAC4; HDAC5; HDAC7A; HDAC9; HGF; HIFIA; HOP1; histamine and histamine receptors; HLA-A; HLA-DOB (Beta subunit of MHC class II molecule (Ia antigen); HLA-DRA; HM74; HMOXI; HUMCYT2A; ICEBERG; ICOSL; 1D2; IFN-α; IFNA1; IFNA2; IFNA4; IFNA5; IFNA6; IFNA7; IFNB1; IFNgamma; DFNW1; IGBP1; IGF1; IGFIR; IGF2; IGFBP2; IGFBP3; IGFBP6; IL-1; IL10; IL10RA; IL10RB; IL11; IL11RA; IL-12; IL12A; IL12B; IL12RB1; IL12RB2; IL13; IL13RA1; IL13RA2; IL14; IL15; IL15RA; IL16; IL17; IL17B; IL17C; IL17R; IL18; IL18BP; IL18R1; IL18RAP; IL19; ILIA; IL1B; ILIF10; IL1F5; IL1F6; IL1F7; IL1F8; IL1F9; IL1HY1; ILIR1; ILIR2; IL1RAP; IL1RAPL1; IL1RAPL2; IL1RL1; IL1RL2, IL1RN; IL2; IL20; IL20Ra; IL21R; IL22; IL-22c; IL22R; IL22RA2; IL23; IL24; IL25; IL26; IL27; IL28A; IL28B; IL29; IL2RA; IL2RB; IL2RG; IL3; IL30; IL3RA; IL4; IL4R; IL5; IL5RA; IL6; IL6R; IL6ST (glycoprotein 130); influenza A; influenza B; EL7; EL7R; EL8; IL8RA; DL8RB; IL8RB; DL9; DL9R; DLK; INHA; INHBA; INSL3; INSL4; IRAK1; IRTA2 (Immunoglobulin superfamily receptor translocation associated 2); ERAK2; ITGA1; ITGA2; ITGA3; ITGA6 (a6 integrin); ITGAV; ITGB3; ITGB4 (b4 integrin); α4β7 and αEβ7 integrin heterodimers; JAG1; JAK1; JAK3; JUN; K6HF; KAI1; KDR; KITLG; KLF5 (GC Box BP); KLF6; KLKIO; KLK12; KLK13; KLK14; KLK15; KLK3; KLK4; KLK5; KLK6; KLK9; KRT1; KRT19 (Keratin 19); KRT2A; KHTHB6 (hair-specific type H keratin); LAMAS; LEP (leptin); LGR5 (leucine-rich repeat-containing G protein-coupled receptor 5; GPR49, GPR67); Lingo-p75; Lingo-Troy; LPS; LTA (TNF-b); LTB; LTB4R (GPR16); LTB4R2; LTBR; LY64 (Lymphocyte antigen 64 (RP105), type I membrane protein of the leucine rich repeat (LRR) family); Ly6E (lymphocyte antigen 6 complex, locus E; Ly67, RIG-E, SCA-2, TSA-1); Ly6G6D (lymphocyte antigen 6 complex, locus G6D; Ly6-D, MEGT1); LY6K (lymphocyte antigen 6 complex, locus K; LY6K; HSJ001348; FLJ35226); MACMARCKS; MAG or OMgp; MAP2K7 (c-Jun); MDK; MDP; MIB1; midkine; MEF; MIP-2; MKI67; (Ki-67); MMP2; MMP9; MPF (MPF, MSLN, SMR, megakaryocyte potentiating factor, mesothelin); MS4A1; MSG783 (RNF124, hypothetical protein FLJ20315); MSMB; MT3 (metallothionectin-111); MTSS1; MUC1 (mucin); MYC; MY088; Napi3b (also known as NaPi2b) (NAPI-3B, NPTIIb, SLC34A2, solute carrier family 34 (sodium phosphate), member 2, type II sodium-dependent phosphate transporter 3b); NCA; NCK2; neurocan; NFKB1; NFKB2; NGFB (NGF); NGFR; NgR-Lingo; NgR-Nogo66 (Nogo); NgR-p75; NgR-Troy; NME1 (NM23A); NOX5; NPPB; NROB1; NROB2; NR1D1; NR1D2; NR1H2; NR1H3; NR1H4; NR112; NR113; NR2C1; NR2C2; NR2E1; NR2E3; NR2F1; NR2F2; NR2F6; NR3C1; NR3C2; NR4A1; NR4A2; NR4A3; NR5A1; NR5A2; NR6A1; NRP1; NRP2; NT5E; NTN4; ODZI; OPRD1; OX40; P2RX7; P2X5 (Purinergic receptor P2X ligand-gated ion channel 5); PAP; PART1; PATE; PAWR; PCA3; PCNA; PD-L1; PD-L2; PD-1; POGFA; POGFB; PECAM1; PF4 (CXCL4); PGF; PGR; phosphacan; PIAS2; PIK3CG; PLAU (uPA); PLG; PLXDC1; PMEL17 (silver homolog; SILV; D12S53E; PMEL17; SI; SIL); PPBP (CXCL7); PPID; PRI; PRKCQ; PRKDI; PRL; PROC; PROK2; PSAP; PSCA hlg (2700050C12Rik, C530008016Rik, RIKEN cDNA 2700050C12, RIKEN cDNA 2700050C12 gene); PTAFR; PTEN; PTGS2 (COX-2); PTN; RAC2 (p21 Rac2); RARB; RET (ret proto-oncogene; MEN2A; HSCR1; MEN2B; MTC1; PTC; CDHF12; Hs.168114; RET51; RET-ELE1); RGSI; RGS13; RGS3; RNF110 (ZNF144); ROBO2; S100A2; SCGB1D2 (lipophilin B); SCGB2A1 (mammaglobin2); SCGB2A2 (mammaglobin 1); SCYEI (endothelial Monocyte-activating cytokine); SDF2; Sema 5b (FLJ10372, KIAA1445, Mm.42015, SEMA5B, SEMAG, Semaphorin 5b Hlog, sema domain, seven thrombospondin repeats (type 1 and type 1-like), transmembrane domain (TM) and short cytoplasmic domain, (semaphorin) 5B); SERPINA1; SERPINA3; SERPINB5 (maspin); SERPINE1 (PAI-1); SERPDMF1; SHBG; SLA2; SLC2A2; SLC33A1; SLC43A1; SLIT2; SPPI; SPRR1B (Sprl); ST6GAL1; STABI; STAT6; STEAP (six transmembrane epithelial antigen of prostate); STEAP2 (HGNC_8639, IPCA-1, PCANAP1, STAMP1, STEAP2, STMP, prostate cancer associated gene 1, prostate cancer associated protein 1, six transmembrane epithelial antigen of prostate 2, six transmembrane prostate protein); TB4R2; TBX21; TCPIO; TOGFI; TEK; TENB2 (putative transmembrane proteoglycan); TGFA; TGFBI; TGFBIII; TGFB2; TGFB3; TGFBI; TGFBRI; TGFBR2; TGFBR3; THIL; THBSI (thrombospondin-1); THBS2; THBS4; THPO; TIE (Tie-1); TMP3; tissue factor; TLR1; TLR2; TLR3; TLR4; TLR5; TLR6; TLR7; TLR8; TLR9; TLR10; TMEFF1 (transmembrane protein with EGF-like and two follistatin-like domains 1; Tomoregulin-1); TMEM46 (shisa homolog 2); TNF; TNF-a; TNFAEP2 (B94); TNFAIP3; TNFRSFIIA; TNFRSF1A; TNFRSF1B; TNFRSF21; TNFRSF5; TNFRSF6 (Fas); TNFRSF7; TNFRSF8; TNFRSF9; TNFSF10 (TRAIL); TNFSF11 (TRANCE); TNFSF12 (AP03L); TNFSF13 (April); TNFSF13B; TNFSF14 (HVEM-L); TNFSF15 (VEGI); TNFSF18; TNFSF4 (OX40 ligand); TNFSF5 (CD40 ligand); TNFSF6 (FasL); TNFSF7 (CD27 ligand); TNFSFS (CD30 ligand); TNFSF9 (4-1 BB ligand); TOLLIP; Toll-like receptors; TOP2A (topoisomerase Ea); TP53; TPM1; TPM2; TRADD; TMEM118 (ring finger protein, transmembrane 2; RNFT2; FLJ14627); TRAF1; TRAF2; TRAF3; TRAF4; TRAF5; TRAF6; TREM1; TREM2; TrpM4 (BR22450, FLJ20041, TRPM4, TRPM4B, transient receptor potential cation channel, subfamily M, member 4); TRPC6; TSLP; TWEAK; Tyrosinase (TYR; OCAIA; OCA1A; tyrosinase; SHEP3); VEGF; VEGFB; VEGFC; versican; VHL C5; VLA-4; XCL1 (lymphotactin); XCL2 (SCM-1b); XCRI (GPR5/CCXCRI); YY1; and/or ZFPM2.

[0214] In certain embodiments, target molecules for antibodies (or bispecific antibodies) produced according to the methods disclosed herein include CD proteins such as CD3, CD4, CD5, CD16, CD19, CD20, CD21 (CR2 (Complement receptor 2) or C3DR (C3d/Epstein Barr virus receptor) or Hs.73792); CD33; CD34; CD64; CD72 (B-cell differentiation antigen CD72, Lyb-2); CD79b (CD79B, CD79B, IGb (immunoglobulin-associated beta), B29); CD200 members of the ErbB receptor family such as the EGF receptor, HER2, HER3, or HER4 receptor; cell adhesion molecules such as LFA-1, Mac1, p150.95, VLA-4, ICAM-1, VCAM, alpha4/beta7 integrin, and alphav/beta3 integrin including either alpha or beta subunits thereof (e.g., anti-CD11a, anti-CD18, or anti-CD11b antibodies); growth factors such as VEGF-A, VEGF-C; tissue factor (TF); alpha interferon (alphaIFN); TNFalpha, an interleukin, such as IL-1 beta, IL-3, IL-4, IL-5, IL-6, IL-8, IL-9, IL-13, IL 17 AF, IL-1S, IL-13R alpha1, IL13R alpha2, IL-4R, IL-5R, IL-9R, IgE; blood group antigens; flk2/flt3 receptor; obesity (OB) receptor; mpl receptor; CTLA-4; RANKL, RANK, RSV F protein, protein C etc. In certain embodiments, the methods provided herein can be used to produce an antibody (or a multispecific antibody, such as a bispecific antibody) that specifically binds to complement protein C5 (e.g., an anti-C5 agonist antibody that specifically binds to human C5).

[0215] In certain embodiments, the methods provided herein can be used to produce an antibody (or a multispecific antibody, such as a bispecific antibody) that specifically binds to influenza virus B hemagglutinin, i.e., “fluB” (e.g., an antibody that binds hemagglutinin from the Yamagata lineage of influenza B viruses, binds hemagglutinin from the Victoria lineage of influenza B viruses, binds hemagglutinin from ancestral lineages of influenza B virus, or binds hemagglutinin from the Yamagata lineage, the Victoria lineage, and ancestral lineages of influenza B virus, in vitro and/or in vivo). Further details regarding anti-FluB antibodies are described in WO 2015/148806, which is incorporated herein by reference in its entirety.

[0216] In certain embodiments, an antibody (or bispecific antibody) produced according to a method provided herein binds low density lipoprotein receptor-related protein (LRP)-1 or LRP-8 or transferrin receptor, and at least one target selected from the group consisting of beta-secretase (BACE1 or BACE2), alpha-secretase, gamma-secretase, tau-secretase, amyloid precursor protein (APP), death receptor 6 (DR6), amyloid beta peptide, alpha-synuclein, Parkin, Huntingtin, p75 NTR, CD40 and caspase-6.

[0217] In certain embodiments, the antibody produced according to a method provided herein is a human IgG2 antibody against CD40. In certain embodiments, the anti-CD40 antibody is RG7876.

[0218] In certain embodiments, the polypeptide produced according to a method provided herein is a targeted immunocytokine. In certain embodiments, the targeted immunocytokine is a CEA-IL2v immuocytokine. In certain embodiments, the CEA-IL2v immuocytokine is RG7813. In certain embodiments, the targeted immunocytokine is a FAP-IL2v immuocytokine. In certain embodiments, the FAP-IL2v immunocytokine is RG7461.

[0219] In certain embodiments, a multispecific antibody (such as a bispecific antibody) produced according to a method provided herein binds CEA and at least one additional target molecule. In certain embodiments, a multispecific antibody (such as a bispecific antibody) produced according to a method provided herein binds a tumor targeted cytokine and at least one additional target molecule. In certain embodiments, a multispecific antibody (such as a bispecific antibody) produced according to a method provided herein is fused to IL2v (i.e., an interleukin 2 variant) and binds an IL1-based immunocytokine and at least one additional target molecule. In certain embodiments, a multispecific antibody (such as a bispecific antibody) produced according to a method provided herein is a T-cell bispecific antibody (i.e., a bispecific T-cell engager or BiTE).

[0220] In certain embodiments, a multispecific antibody (such as a bispecific antibody) produced according to a method provided herein binds to at least two target molecules selected from: IL-1 alpha and IL-1 beta, IL-12 and IL-1S; IL-13 and IL-9; IL-13 and IL-4; IL-13 and IL-5; IL-5 and IL-4; IL-13 and IL-1beta; IL-13 and IL-25; IL-13 and TARC; IL-13 and MDC; IL-13 and MEF; IL-13 and TGF˜˜; IL-13 and LHR agonist; IL-12 and TWEAK, IL-13 and CL25; IL-13 and SPRR2a; IL-13 and SPRR2b; IL-13 and ADAMS, IL-13 and PED2, IL17A and IL17F, CEA and CD3, CD3 and CD19, CD138 and CD20; CD138 and CD40; CD19 and CD20; CD20 and CD3; CD3S and CD13S; CD3S and CD20; CD3S and CD40; CD40 and CD20; CD-S and IL-6; CD20 and BR3, TNF alpha and TGF-beta, TNF alpha and IL-1 beta; TNF alpha and IL-2, TNF alpha and IL-3, TNF alpha and IL-4, TNF alpha and IL-5, TNF alpha and IL6, TNF alpha and IL8, TNF alpha and IL-9, TNF alpha and IL-10, TNF alpha and IL-11, TNF alpha and IL-12, TNF alpha and IL-13, TNF alpha and IL-14, TNF alpha and IL-15, TNF alpha and IL-16, TNF alpha and IL-17, TNF alpha and IL-18, TNF alpha and IL-19, TNF alpha and IL-20, TNF alpha and IL-23, TNF alpha and IFN alpha, TNF alpha and CD4, TNF alpha and VEGF, TNF alpha and MIF, TNF alpha and ICAM-1, TNF alpha and PGE4, TNF alpha and PEG2, TNF alpha and RANK ligand, TNF alpha and Te38, TNF alpha and BAFF, TNF alpha and CD22, TNF alpha and CTLA-4, TNF alpha and GP130, TNF a and IL-12p40, VEGF and Angiopoietin, VEGF and HER2, VEGF-A and HER2, VEGF-A and PDGF, HER1 and HER2, VEGFA and ANG2, VEGF-A and VEGF-C, VEGF-C and VEGF-D, HER2 and DR5, VEGF and IL-8, VEGF and MET, VEGFR and MET receptor, EGFR and MET, VEGFR and EGFR, HER2 and CD64, HER2 and CD3, HER2 and CD16, HER2 and HER3; EGFR (HER1) and HER2, EGFR and HER3, EGFR and HER4, IL-14 and IL-13, IL-13 and CD40L, IL4 and CD40L, TNFR1 and IL-1R, TNFR1 and IL-6R and TNER1 and IL-18R, EpCAM and CD3, MAPG and CD28, EGFR and CD64, CSPGs and RGM A; CTLA-4 and BTN02; IGF1 and IGF2; IGF1/2 and Erb2B; MAG and RGM A; NgR and RGM A; NogoA and RGM A; OMGp and RGM A; POL-1 and CTLA-4; and RGM A and RGM B.

[0221] In certain embodiments, the multispecific antibody (such as a bispecific antibody) is an anti-CEA/anti-CD3 bispecific antibody. In certain embodiments, the anti-CEA/anti-CD3 bispecific antibody is RG7802. Further details regarding anti-CEA/anti-CD3 bispecific antibodies are provided in WO 2014/121712, which is incorporated herein by reference in its entirety.

[0222] In certain embodiments, the multispecific antibody (such as a bispecific antibody) is an anti-VEGF/anti-angiopoietin bispecific antibody. In certain embodiments, the anti-VEGF/anti-angiopoietin bispecific antibody bispecific antibody is a Crossmab. In certain embodiments, the anti-VEGF/anti-angiopoietin bispecific antibody is RG7716.

[0223] In certain embodiments, the multispecific antibody (such as a bispecific antibody) is an anti-Ang2/anti-VEGF bispecific antibody. In certain embodiments, the anti-Ang2/anti-VEGF bispecific antibody is RG7221. In certain embodiments, the anti-Ang2/anti-VEGF bispecific antibody is CAS Number 1448221 May 3.

[0224] Many other antibodies and/or other proteins may be expressed by the host cells in accordance with the present disclosure, and the above lists are not meant to be limiting.

[0225] The host cells of the present disclosure may be employed in the production of a molecule of interest at manufacturing scale. “Manufacturing scale” production of therapeutic proteins, or other proteins, utilize cell cultures ranging from about 400 L to about 80,000 L, depending on the protein being produced and the need. Typically, such manufacturing scale production utilizes cell culture sizes from about 400 L to about 25,000 L. Within this range, specific cell culture sizes such as 4,000 L, about 6,000 L, about 8,000, about 10,000, about 12,000 L, about 14,000 L, or about 16,000 L may be utilized.

[0226] The host cells of the present disclosure can be employed in the production of large quantities of a molecule of interest in a shorter timeframe as compared to non-TI cells used in current cell culture methods. In certain embodiments, the host cells of the present disclosure can be employed for improved quality of the molecule of interest as compared to non-TI cells used in current cell culture methods. In certain embodiments, the host cells of the present disclosure can be used to enhance seed train stability by preventing chronic toxicity that can be caused by products that can cause cell stress and clonal instability over time. In certain embodiments, the host cells of the present disclosure can be used for the optimal expression of acutely toxic products.

[0227] In certain embodiments, the host cells, the TI systems of the present disclosure, can be used for cell culture process optimization and/or process development.

[0228] In certain embodiments, the host cells of the present disclosure can be used to accelerate the production of a molecule of interest by about 1 week, about, 2 weeks, about 3 weeks, about 4 weeks, about 5 weeks, about 6 weeks, about 7 weeks, about 8 weeks, about 9 weeks, or about 10 weeks as compared to non-TI cells used in conventional cell culture methods. In certain embodiments, the host cells of the present disclosure can be used to accelerate the harvest of a molecule of interest by about 1 week, about, 2 weeks, about 3 weeks, about 4 weeks, about 5 weeks, about 6 weeks, about 7 weeks, about 8 weeks, about 9 weeks, or about 10 weeks as compared to non-TI cells used in conventional cell culture methods.

[0229] In certain embodiments, the host cells of the present embodiment can be employed to reduce aggregate levels of a molecule of interest as compared to non-TI cells used in conventional cell culture methods.

[0230] In certain embodiments, the host cells of the present disclosure can be used to achieve increased expression of a polypeptide (or polypeptides) of interest relative to a randomly integrated host cell. For example, but not by way of limitation, the host cells of the present disclosure can achieve expression of standard and half antibodies at titers of at least 3 g/L, 3.5 g/L, 4 g/L, 4.5 g/L, 5 g/L, 5.5 g/L, 6 g/L, 6.5 g/L, 7 g/L, 7.5 g/L, 8 g/L, 8.5 g/L, 9 g/L, 9.5 g/L, 10 g/L, 10.5 g/L, 11 g/L, or more, and expression of multispecific antibodies, e.g., bispecific antibodies, of at least 1.5 g/L, 2 g/L, 2.5 g/L, 3 g/L, 3.5 g/L, 4 g/L, 4.5 g/L, 5 g/L, 5.5 g/L, 6 g/L, or more. In certain embodiments, the host cells of the present disclosure can achieve increased bispecific content relative to random integration host cells. For example, but not by way of limitation the host cells of the present disclosure can achieve bispecific content of at least 80%, 85%, 90%, 95%, 96%, 98%, 99% or more.

[0231] In certain embodiments, the host cells of the present disclosure can be used for the constitutive expression of selected subunits of a therapeutic molecule and the regulated expression of other, different subunits of the same therapeutic molecule. In certain embodiments the therapeutic molecule can be a fusion protein. In certain embodiments, the host cells of the present disclosure can be used to understand the roles and effects of each antibody subunit in the expression and secretion of fully assembled antibody molecules.

[0232] In certain embodiments, the host cells of the present disclosure can be used as an investigational tool. In certain embodiments, the host cells of the present disclosure can be used as a diagnostic tool to map out the root causes of low protein expression for problematic molecules in various cells. In certain embodiments, the host cells of the present disclosure can be used to directly link an observed phenomenon or cellular behavior to the transgene expression in the cells. The host cell of the present disclosure can also be used to demonstrate whether or not an observed behavior is reversible in the cells. In certain embodiments, the host cells of the present disclosure can be exploited to identify and mitigate problems with respect to transgene(s) transcription and expression in cells.

[0233] In certain embodiments, the host cells of the present disclosure can be used for swapping transgene subunits, such as but not limited to, HC and LC subunits of an antibody, of a difficult-to-express molecule with that of an average molecule in the TI system to identify the problematic subunit(s). In certain embodiments, amino acid sequence analysis can then be used to narrow down and focus on the amino acid residues or regions that might be responsible for low protein expression.

### 8. Exemplary Non-Limiting Embodiments

[0234] A. A targeted integration (TI) host cell comprising an exogenous nucleotide sequence integrated at an integration site within a specific locus of the genome of the host cell, wherein the locus is at least about 90% homologous to a sequence selected from SEQ ID Nos. 1-7.
[0235] A1. The TI host cell of A, wherein the nucleotide sequence immediately 5′ of the integrated exogenous nucleotide sequence is selected from the group consisting of sequences at least about 90% homologous to nucleotides 41190-45269 of NW_006874047.1, nucleotides 63590-207911 of NW_006884592.1, nucleotides 253831-491909 of NW_006881296.1, nucleotides 69303-79768 of NW_003616412.1, nucleotides 293481-315265 of NW_003615063.1, nucleotides 2650443-2662054 of NW_006882936.1, or nucleotides 82214-97705 of NW_003615411.1.
[0236] A2. The TI host cell of A wherein the nucleotide sequence immediately 5′ of the integrated exogenous nucleotide sequence is selected from the group consisting of sequences at least 15 base pairs, at least 20 base pairs, at least 30 base pairs, at least 40 base pairs, at least 50 base pairs, at least 75 base pairs, at least 100 base pairs, at least 150 base pairs, at least 200 base pairs, at least 300 base pairs, at least 400 base pairs, at least 500 base pairs, at least 1,000 base pairs, at least 1,500 base pairs, at least 2,000 base pairs, at least 3,000 base pairs from nucleotide 45269 of NW_006874047.1, nucleotide 207911 of NW_006884592.1, nucleotide 491909 of NW_006881296.1, nucleotide 79768 of NW_003616412.1, nucleotide 315265 of NW_003615063.1, nucleotide 2662054 of NW_006882936.1, or nucleotide 97705 of NW_003615411.1.
[0237] A3. The TI host cell of A, wherein the nucleotide sequence immediately 3′ of the integrated exogenous nucleotide sequence is selected from the group consisting of sequences at least about 90% homologous to nucleotides 45270-45490 of NW_006874047.1, nucleotides 207912-792374 of NW_006884592.1, nucleotides 491910-667813 of NW_006881296.1, nucleotides 79769-100059 of NW_003616412.1, nucleotides 315266-362442 of NW_003615063.1, nucleotides 2662055-2701768 of NW_006882936.1, or nucleotides 97706-105117 of NW_003615411.1.
[0238] A4. The TI host cell of A wherein the nucleotide sequence immediately 3′ of the integrated exogenous nucleotide sequence is selected from the group consisting of sequences at least 15 base pairs, at least 20 base pairs, at least 30 base pairs, at least 40 base pairs, at least 50 base pairs, at least 75 base pairs, at least 100 base pairs, at least 150 base pairs, at least 200 base pairs, at least 300 base pairs, at least 400 base pairs, at least 500 base pairs, at least 1,000 base pairs, at least 1,500 base pairs, at least 2,000 base pairs, at least 3,000 base pairs from nucleotide 45270 of NW_006874047.1, nucleotide 207912 of NW_006884592.1, nucleotide 491910 of NW_006881296.1, nucleotide 79769 of NW_003616412.1, nucleotide 315266 of NW_003615063.1, nucleotide 2662055 of NW_006882936.1, or nucleotide 97706 of NW_003615411.1
[0239] A5. The TI host cell of any one of A-A4, wherein the integrated exogenous nucleotide sequence is operably linked to a nucleotide sequence selected from the group consisting of sequences at least about 90% homologous to a sequence selected from SEQ ID Nos. 1-7.
[0240] A6. A TI host cell comprising an exogenous nucleotide sequence integrated at an integration site within an endogenous gene selected from the group consisting of LOC107977062, LOC100768845, ITPR2, ERE67000.1, UBAP2, MTMR2, XP_003512331.2, and sequences at least about 90% homologous thereto.
[0241] A7. A TI host cell comprising an exogenous nucleotide sequence integrated at an integration site operably linked to an endogenous gene selected from the group consisting of LOC107977062, LOC100768845, ITPR2, ERE67000.1, UBAP2, MTMR2, XP 003512331.2, and sequences at least about 90% homologous thereto.
[0242] A8. A TI host cell comprising an exogenous nucleotide sequence integrated at an integration site immediately adjacent to all or a portion of a sequence selected from the group consisting of sequences at least about 90% homologous to a sequence selected from SEQ ID Nos. 1-7.
[0243] A9. The TI host cell of any one of A-A8, wherein the TI host cell is a mammalian host cell.
[0244] A10. The TI host cell of A9, wherein the TI host cell is a hamster host cell, a human host cell, a rat host cell, or a mouse host cell.
[0245] A11. The TI host cell of A9 or A10, wherein the TI host cell is a Chinese hamster ovary (CHO) host cell, a CHO K1 host cell, a CHO K1SV host cell, a DG44 host cell, a DUKXB-11 host cell, a CHOKIS host cell, or a CHO KIM host cell.
[0246] A12. The TI host cell of any one of A-A11, wherein the exogenous nucleotide sequence comprises one or more recombination recognition sequences (RRSs), wherein the RRS can be recognized by a recombinase.
[0247] A13. The TI host cell of A12, wherein the exogenous nucleotide sequence comprises at least two RRSs.
[0248] A14. The TI host cell of A12 or A13, wherein the recombinase is a Cre recombinase or an FLP recombinase.
[0249] A15. The TI host cell of A12 or A13, wherein the recombinase is a Bxb1 integrase or a φC31 integrase.
[0250] A16. The TI host cell of any one of A12-A15, wherein the RRS is selected from the group consisting of a LoxP sequence, a LoxP L3 sequence, a LoxP 2L sequence, a LoxFas sequence, a Lox511 sequence, a Lox2272 sequence, a Lox2372 sequence, a Lox5171 sequence, a Loxm2 sequence, a Lox71 sequence, a Lox66 sequence, a FRT sequence, a Bxb1 attP sequence, a Bxb1 attB sequence, a φC31 attP sequence, and a C31 attB sequence.
[0251] A17. The TI host cell of any one of A13-A16, wherein the exogenous nucleotide sequence comprises a first and a second RRS, and at least one selection marker located between the first and the second RRS.
[0252] A18. The TI host cell of A17, comprising a first selection marker, wherein the first selection marker is selected from the group consisting of aminoglycoside phosphotransferase (APH), hygromycin phosphotransferase (HYG), neomycin, G418 APH), dihydrofolate reductase (DHFR), thymidine kinase (TK), glutamine synthetase (GS), asparagine synthetase, tryptophan synthetase (indole), histidinol dehydrogenase (histidinol D), blasticidin, bleomycin, phleomycin, chloramphenicol, Zeocin, and mycophenolic acid.
[0253] A19. The TI host cell of A17 or A18, further comprising a second selection marker, wherein the first and the second selection markers are different.
[0254] A20. The TI host cell of A19, wherein the second selection marker is selected from the group consisting of aminoglycoside phosphotransferase (APH), hygromycin phosphotransferase (HYG), neomycin, G418 APH), dihydrofolate reductase (DHFR), thymidine kinase (TK), glutamine synthetase (GS), asparagine synthetase, tryptophan synthetase (indole), histidinol dehydrogenase (histidinol D), blasticidin, bleomycin, phleomycin, chloramphenicol, Zeocin, and mycophenolic acid.
[0255] A21. The TI host cell of A19 or A20, further comprising a third selection marker and an internal ribosome entry site (IRES), wherein the IRES is operably linked to the third selection marker.
[0256] A22. The TI host cell of A21, wherein the third selection marker is different from the first or the second selection marker.
[0257] A23. The TI host cell of A21 or A22, wherein the third selection marker is selected from the group consisting of a green fluorescent protein (GFP) marker, an enhanced GFP (eGFP) marker, a synthetic GFP marker, a yellow fluorescent protein (YFP) marker, an enhanced YFP (eYFP) marker, a cyan fluorescent protein (CFP) marker, a mPlum marker, a mCherry marker, a tdTomato marker, a mStrawberry marker, a J-red marker, a DsRed-monomer marker, a mOrange marker, a mKO marker, a mCitrine marker, a Venus marker, a YPet marker, an Emerald6 marker, a CyPet marker, a mCFPm marker, a Cerulean marker, and a T-Sapphire marker.
[0258] A24. The TI host cell of any one of A17-A23, further comprising a third RRS, wherein the third RRS is located between the first and the second RRS, and the third RRS is heterospecific relative the first or the second RRS.
[0259] A25. The TI host cell of any one of A12-A24, wherein the exogenous nucleotide sequence comprises at least one selection marker and at least one exogenous sequence of interest (SOI).
[0260] A26. The TI host cell any one of A12-A25, wherein the exogenous nucleotide sequence further comprises at least one exogenous SOI.
[0261] A27. The TI host cell of A26, wherein the exogenous SOI is located between the first and the second RRS.
[0262] A28. The TI host cell of A26 or A27, wherein the SOI encodes a single chain antibody, an antibody light chain, an antibody heavy chain, a single-chain Fv fragment (scFv), or an Fc fusion protein.
[0263] A29. The TI host cell of any one of A24-A28, wherein the exogenous nucleotide sequence further comprises at least one exogenous SOI located between the first and the third RRS, and at least one exogenous SOI located between the third and the second RRS.
[0264] A30. The TI host cell of A29, wherein the SOI encodes a single chain antibody, an antibody light chain, an antibody heavy chain, a single-chain Fv fragment (scFv), or an Fc fusion protein.
[0265] A31. The TI host cell of A26 wherein the SOI encodes an antibody expressed at a higher level relative to a randomly integrated host cell.
[0266] A32. The TI host cell of A31 where the antibody is a standard or half antibodies expressed at a titer of at least 3 g/L, 3.5 g/L, 4 g/L, 4.5 g/L, 5 g/L, 5.5 g/L, 6 g/L, 6.5 g/L, 7 g/L, 7.5 g/L, 8 g/L, 8.5 g/L, 9 g/L, 9.5 g/L, 10 g/L, 10.5 g/L, 11 g/L, or more,
[0267] A33. The TI host cell of A31 where the antibody is a multispecific antibody, e.g., a bispecific antibody, expressed at a titer of at least 1.5 g/L, 2 g/L, 2.5 g/L, 3 g/L, 3.5 g/L, 4 g/L, 4.5 g/L, 5 g/L, 5.5 g/L, 6 g/L.
[0268] A34. The TI host cell of A31 where the antibody is a bispecific antibody and the bispecific content is increased relative to a random integration host cell.
[0269] A35. The TI host cell of A1 wherein the antibody is a bispecific antibody and the bispecific content is at least 80%, 85%, 90%, 95%, 96%, 98%, 99% or more.
[0270] B. A method of preparing a TI host cell expressing a polypeptide of interest comprising: providing a TI host cell comprising an exogenous nucleotide sequence integrated at a site within a locus of the genome of the TI host cell, wherein the locus is at least about 90% homologous to a sequence selected from SEQ ID No. 1-7, wherein the exogenous nucleotide sequence comprises two RRSs, flanking at least one first selection marker; introducing into the cell provided in a) a vector comprising two RRSs matching the two RRSs on the integrated exogenous nucleotide sequence and flanking at least one exogenous SOI and at least one second selection marker; introducing a recombinase or a nucleic acid encoding a recombinase, wherein the recombinase recognizes the RRSs; and selecting for TI cells expressing the second selection marker to thereby isolate a TI host cell expressing the polypeptide.
[0271] B1. The method of B, wherein the recombinase is Cre recombinase or an FLP recombinase.
[0272] B2. The method of B, wherein the recombinase is a Bxb1 integrase or a @C31 integrase.
[0273] B3. The method of any one of B-B2, wherein the SOI encodes a single chain antibody, an antibody light chain, an antibody heavy chain, a single-chain Fv fragment (scFv), or an Fc fusion protein.
[0274] B4. The method of any one of claims B-B3, wherein the TI host cell is a mammalian host cell.
[0275] B5. The method of B4, wherein the TI host cell is a hamster host cell, a human host cell, a rat host cell, or a mouse host cell.
[0276] B6. The method of B4 or B5, wherein the TI host cell is a CHO host cell, a CHO K1 host cell, a CHO K1SV host cell, a DG44 host cell, a DUKXB-11 host cell, a CHOK1S host cell, or a CHO KIM host cell.
[0277] C. A method for expressing a polypeptide of interest comprising: providing a TI host cell comprising at least one exogenous SOI and at least one selection marker where the at least one exogenous SOI and at least one selection marker are flanked by two RRSs integrated within a locus of the genome of the TI host cell, wherein the locus is at least about 90% homologous to a sequence selected from SEQ ID Nos. 1-7; and culturing the cell in a) under conditions suitable for expressing the polypeptide of interest and recovering a polypeptide of interest therefrom.
[0278] C1. The method of C, wherein the at least one exogenous SOI encodes a single chain antibody, an antibody light chain, an antibody heavy chain, a single-chain Fv fragment (scFv), or an Fc fusion protein.
[0279] D. A method for preparing a TI host cell expressing at least a first and second polypeptide of interest comprising: providing a TI host cell comprising an exogenous nucleotide sequence integrated at a site within a locus of the genome of the host cell, wherein the locus is at least about 90% homologous to a sequence selected from SEQ ID Nos. 1-7, wherein the exogenous nucleotide sequence comprises a first and a second RRS flanking at least one first selection marker, and a third RRS located between the first and the second RRS, and all the RRSs are heterospecific; introducing into the cell provided in a) a first vector comprising two RRSs matching the first and the third RRS on the integrated exogenous nucleotide sequence and flanking at least one first exogenous SOI and at least one second selection marker; introducing into the cell provided in a) a second vector comprising two RRSs matching the second and the third RRS on the integrated exogenous nucleotide sequence and flanking at least one second exogenous SOI; introducing one or more recombinases, or one or more nucleic acids encoding one or more recombinases, wherein the one or more recombinases recognize the RRSs; and selecting for TI cells expressing the second selection marker to thereby isolate a TI host cell expressing the first and second polypeptides of interest.
[0280] D1. The method of D, wherein the recombinase is Cre recombinase or an FLP recombinase.
[0281] D2. The method of D, wherein the recombinase is a Bxb1 integrase or a φC31 integrase.
[0282] D3. The method of D, wherein: the first vector further comprises a promoter sequence operably linked to the codon ATG positioned flanked upstream by the first SOI and downstream by an RRS; and the second vector further comprises a selection marker lacking an ATG transcription start codon flanked upstream by an RRS and downstream by the second SOI.
[0283] D4. The method of any one of D-D3, wherein the first SOI encodes a single chain antibody, an antibody light chain, an antibody heavy chain, a single-chain Fv fragment (scFv), or an Fc fusion protein.
[0284] D5. The method of any one of D-D3, wherein the second SOI encodes a single chain antibody, an antibody light chain, an antibody heavy chain, a single-chain Fv fragment (scFv), or an Fc fusion protein.
[0285] D6. The method of any one of C or D-D5, wherein the TI host cell is a mammalian host cell.
[0286] D7. The method of D6, wherein the TI host cell is a hamster host cell, a human host cell, a rat host cell, or a mouse host cell.
[0287] D8. The method of D7, wherein the TI host cell is a CHO host cell, a CHO K1 host cell, a CHO K1SV host cell, a DG44 host cell, a DUKXB-11 host cell, a CHOKIS host cell, or a CHO KIM host cell.
[0288] E. A method for expressing a polypeptide of interest comprising: providing a host cell comprising at least two exogenous SOIs and at least one selection marker integrated within a locus of the genome of the host cell, wherein the locus is at least about 90% homologous to a sequence selected from SEQ ID Nos 1-7, wherein at least one exogenous SOI and one selection marker is flanked by a first and a third RRS and at least one exogenous SOI is flanked by a second and the third RRS; and culturing the cell in a) under conditions suitable for expressing the polypeptide of interest and recovering a polypeptide of interest therefrom.
[0289] E1. The method of E, wherein the first SOI encodes a single chain antibody, an antibody light chain, an antibody heavy chain, a single-chain Fv fragment (scFv), or an Fc fusion protein.
[0290] E2. The method of E or E1, wherein the second SOI encodes a single chain antibody, an antibody light chain, an antibody heavy chain, a single-chain Fv fragment (scFv), or an Fc fusion protein.
[0291] E3. The method of any one of E-E2, wherein the TI host cell is a mammalian host cell.
[0292] E4. The method of E3, wherein the TI host cell is a hamster host cell, a human host cell, a rat host cell, or a mouse host cell.
[0293] E5. The method of E4, wherein the TI host cell is a CHO host cell, a CHO K1 host cell, a CHO K1SV host cell, a DG44 host cell, a DUKXB-11 host cell, a CHOKIS host cell, or a CHO KIM host cell.
[0294] F. A vector comprising two nucleotide sequences at least 50% homologous to
[0295] a) two reference sequences selected from any portion of SEQ ID No. 1;
[0296] b) two reference sequences selected from any portion of SEQ ID No. 2;
[0297] c) two reference sequences selected from any portion of SEQ ID No. 3;
[0298] d) two reference sequences selected from any portion of SEQ ID No. 4;
[0299] e) two reference sequences selected from any portion of SEQ ID No 5;
[0300] f) two reference sequences selected from any portion of SEQ ID No. 6; or
[0301] g) two reference sequences selected from any portion of SEQ ID No. 7, wherein said sequences flank a DNA cassette, wherein the DNA cassette comprises at least one selection marker and at least one exogenous SOI flanked by two RRSs.
[0302] F1. The vector of F, wherein the vector comprises two nucleotide sequences at least 60% homologous to the two reference sequences.
[0303] F2. The vector of F, wherein the vector comprises two nucleotide sequences at least 70% homologous to the two reference sequences.
[0304] F3. The vector of F, wherein the vector comprises two nucleotide sequences at least 80% homologous to the two reference sequences.
[0305] F4. The vector of F, wherein the vector comprises two nucleotide sequences at least 90% homologous to the two reference sequences.
[0306] F5. The vector of F, wherein the vector comprises two nucleotide sequences at least 95% homologous to the two reference sequences.
[0307] F6. The vector of F, wherein the vector comprises two nucleotide sequences at least 99% homologous to the two reference sequences.
[0308] F7. The vector of any of F-F6, wherein the vector is selected from the group consisting of an adenovirus vector, an adeno-associated virus vector, a lentivirus vector, a retrovirus vector, an integrating phage vector, a non-viral vector, a transposon and/or transposase vector, an integrase substrate, and a plasmid.
[0309] F8. The vector of any of F-F7, wherein the SOI encodes a single chain antibody, an antibody light chain, an antibody heavy chain, a single-chain Fv fragment (scFv), or an Fc fusion protein.
[0310] G. A method for preparing a TI host cell expressing a polypeptide of interest comprising: providing a host cell comprising a locus of the genome of the host cell, wherein the locus is at least about 90% homologous to a sequence selected from SEQ ID Nos. 1-7; introducing a vector into the host cell, wherein the vector comprises nucleotide sequences at least 50% homologous to a sequence selected from SEQ ID Nos. 1-7 flanking a DNA cassette, wherein the DNA cassette comprises at least one selection marker and at least one exogenous SOI flanked by two RRSs; and selecting for the selection marker to isolate a TI host cell with the SOI integrated in the locus of the genome and expressing the polypeptide of interest.
[0311] G1. The method of G, wherein the vector is selected from the group consisting of an adenovirus vector, an adeno-associated virus vector, a lentivirus vector, a retrovirus vector, an integrating phage vector, a non-viral vector, a transposon and/or transposase vector, an integrase substrate, and a plasmid.
[0312] G2. The method of G or G1, wherein the at least one SOI encodes a single chain antibody, an antibody light chain, an antibody heavy chain, a single-chain Fv fragment (scFv), or an Fc fusion protein.
[0313] G3. The method of any one of G-G2, wherein the TI host cell is a mammalian host cell.
[0314] G4. The method of G3, wherein the TI host cell is a hamster host cell, a human host cell, a rat host cell, or a mouse host cell.
[0315] G5. The method of G3 or G4, wherein the TI host cell is a CHO host cell, a CHO K1 host cell, a CHO K1SV host cell, a DG44 host cell, a DUKXB-11 host cell, a CHOK1S host cell, or a CHO KIM host cell.
[0316] G6. The method of any one of G1-G5, wherein the integration of the nucleic acid comprising the at least one SOI and selection marker is promoted by an exogenous nuclease.
[0317] G7. The method of G6, wherein the exogenous nuclease is selected from the group consisting of a zinc finger nuclease (ZFN), a ZFN dimer, a transcription activator-like effector nuclease (TALEN), a TAL effector domain fusion protein, an RNA-guided DNA endonuclease, an engineered meganuclease, and a clustered regularly interspaced short palindromic repeats (CRISPR)-associated (Cas) endonuclease.
[0318] G8. The method of G, wherein the polypeptide of interest is a multispecific antibody.
[0319] G9. The method of G8, wherein the multispecific antibody is a bispecific antibody.
[0320] H. A TI host cell comprising at least one exogenous nucleotide sequence integrated at an integration site within one or more specific loci of the genome of the host cell, wherein the locus is at least about 90% homologous to a sequence selected from SEQ ID Nos. 1-7.
[0321] H1. A TI host cell comprising at least one exogenous nucleotide sequence integrated at one or more integration sites within an endogenous gene selected from the group consisting of LOC107977062, LOC100768845, ITPR2, ERE67000.1, UBAP2, MTMR2, XP_003512331.2, and sequences at least about 90% homologous thereto.
[0322] H2. The TI host cell of any one of H-H1, wherein the at least one exogenous nucleotide sequence comprises one or more recombination recognition sequences (RRSs), wherein the RRS can be recognized by a recombinase.
[0323] H3. The TI host cell of H2, wherein the at least one exogenous nucleotide sequence further comprises at least one exogenous SOI.
[0324] H4. The TI host cell of any of H-H3, wherein the host cell comprises at least one exogenous nucleotide sequence at a first locus of the genome of the host cell and at least one exogenous nucleotide sequence at one or more secondary locus of the genome of the host cell.
[0325] H5. The TI host cell of H4 where the first locus comprises a sequence at least 90% homologous to all or a portion SEQ ID No. 1 and the secondary locus comprises at least one sequence at least 90% homologous to all or a portion of SEQ ID No. 2, SEQ ID No. 3, SEQ ID No. 4, SEQ ID No. 5, SEQ ID No. 6, or SEQ ID No. 7.
[0326] H5.1. The TI host cell of H4 where the first locus comprises a sequence at least 90% homologous to all or a portion SEQ ID No. 1 and the secondary locus comprises at least one sequence at least 90% homologous to all or a portion of SEQ ID No. 2.
[0327] H5.2. The TI host cell of H4 where the first locus comprises a sequence at least 90% homologous to all or a portion SEQ ID No. 1 and the secondary locus comprises at least one sequence at least 90% homologous to all or a portion of SEQ ID No. 3.
[0328] H5.3. The TI host cell of H4 where the first locus comprises a sequence at least 90% homologous to all or a portion SEQ ID No. 1 and the secondary locus comprises at least one sequence at least 90% homologous to all or a portion of SEQ ID No. 4.
[0329] H5.4. The TI host cell of H4 where the first locus comprises a sequence at least 90% homologous to all or a portion SEQ ID No. 1 and the secondary locus comprises at least one sequence at least 90% homologous to all or a portion of SEQ ID No. 5.
[0330] H5.5. The TI host cell of H4 where the first locus comprises a sequence at least 90% homologous to all or a portion SEQ ID No. 1 and the secondary locus comprises at least one sequence at least 90% homologous to all or a portion of SEQ ID No. 6.
[0331] H5.6. The TI host cell of H4 where the first locus comprises a sequence at least 90% homologous to all or a portion SEQ ID No. 1 and the secondary locus comprises at least one sequence at least 90% homologous to all or a portion of SEQ ID No. 7.
[0332] H6. The TI host cell of H4 where the first locus comprises a sequence at least 90% homologous to all or a portion SEQ ID No. 2 and the secondary locus comprises at least one sequence at least 90% homologous to all or a portion of SEQ ID No. 1, SEQ ID No. 3, SEQ ID No. 4, SEQ ID No. 5, SEQ ID No. 6, or SEQ ID No. 7.
[0333] H6.1. The TI host cell of H4 where the first locus comprises a sequence at least 90% homologous to all or a portion SEQ ID No. 2 and the secondary locus comprises at least one sequence at least 90% homologous to all or a portion of SEQ ID No. 1.
[0334] H6.2. The TI host cell of H4 where the first locus comprises a sequence at least 90% homologous to all or a portion SEQ ID No. 2 and the secondary locus comprises at least one sequence at least 90% homologous to all or a portion of SEQ ID No. 3.
[0335] H6.3. The TI host cell of H4 where the first locus comprises a sequence at least 90% homologous to all or a portion SEQ ID No. 2 and the secondary locus comprises at least one sequence at least 90% homologous to all or a portion of SEQ ID No. 4.
[0336] H6.4. The TI host cell of H4 where the first locus comprises a sequence at least 90% homologous to all or a portion SEQ ID No. 2 and the secondary locus comprises at least one sequence at least 90% homologous to all or a portion of SEQ ID No. 5.
[0337] H6.5. The TI host cell of H4 where the first locus comprises a sequence at least 90% homologous to all or a portion SEQ ID No. 2 and the secondary locus comprises at least one sequence at least 90% homologous to all or a portion of SEQ ID No. 6.
[0338] H6.6. The TI host cell of H4 where the first locus comprises a sequence at least 90% homologous to all or a portion SEQ ID No. 2 and the secondary locus comprises at least one sequence at least 90% homologous to all or a portion of SEQ ID No. 7.
[0339] H7. The TI host cell of H4 where the first locus comprises a sequence at least 90% homologous to all or a portion SEQ ID No. 3 and the secondary locus comprises at least one sequence at least 90% homologous to all or a portion of SEQ ID No. 1, SEQ ID No. 2, SEQ ID No. 4, SEQ ID No. 5, SEQ ID No. 6, or SEQ ID No. 7.
[0340] H7.1. The TI host cell of H4 where the first locus comprises a sequence at least 90% homologous to all or a portion SEQ ID No. 3 and the secondary locus comprises at least one sequence at least 90% homologous to all or a portion of SEQ ID No. 1.
[0341] H7.2. The TI host cell of H4 where the first locus comprises a sequence at least 90% homologous to all or a portion SEQ ID No. 3 and the secondary locus comprises at least one sequence at least 90% homologous to all or a portion of SEQ ID No. 2.
[0342] H7.3. The TI host cell of H4 where the first locus comprises a sequence at least 90% homologous to all or a portion SEQ ID No. 3 and the secondary locus comprises at least one sequence at least 90% homologous to all or a portion of SEQ ID No. 4.
[0343] H7.4. The TI host cell of H4 where the first locus comprises a sequence at least 90% homologous to all or a portion SEQ ID No. 3 and the secondary locus comprises at least one sequence at least 90% homologous to all or a portion of SEQ ID No. 5.
[0344] H7.5. The TI host cell of H4 where the first locus comprises a sequence at least 90% homologous to all or a portion SEQ ID No. 3 and the secondary locus comprises at least one sequence at least 90% homologous to all or a portion of SEQ ID No. 6.
[0345] H7.6. The TI host cell of H4 where the first locus comprises a sequence at least 90% homologous to all or a portion SEQ ID No. 3 and the secondary locus comprises at least one sequence at least 90% homologous to all or a portion of SEQ ID No. 7.
[0346] H8. The TI host cell of H4 where the first locus comprises a sequence at least 90% homologous to all or a portion SEQ ID No. 4 and the secondary locus comprises at least one sequence at least 90% homologous to all or a portion of SEQ ID No. 1, SEQ ID No. 2, SEQ ID No. 3, SEQ ID No. 5, SEQ ID No. 6, or SEQ ID No. 7.
[0347] H8.1. The TI host cell of H4 where the first locus comprises a sequence at least 90% homologous to all or a portion SEQ ID No. 4 and the secondary locus comprises at least one sequence at least 90% homologous to all or a portion of SEQ ID No. 1.
[0348] H8.2. The TI host cell of H4 where the first locus comprises a sequence at least 90% homologous to all or a portion SEQ ID No. 4 and the secondary locus comprises at least one sequence at least 90% homologous to all or a portion of SEQ ID No. 2.
[0349] H8.3. The TI host cell of H4 where the first locus comprises a sequence at least 90% homologous to all or a portion SEQ ID No. 4 and the secondary locus comprises at least one sequence at least 90% homologous to all or a portion of SEQ ID No. 3.
[0350] H8.4. The TI host cell of H4 where the first locus comprises a sequence at least 90% homologous to all or a portion SEQ ID No. 4 and the secondary locus comprises at least one sequence at least 90% homologous to all or a portion of SEQ ID No. 5.
[0351] H8.5. The TI host cell of H4 where the first locus comprises a sequence at least 90% homologous to all or a portion SEQ ID No. 4 and the secondary locus comprises at least one sequence at least 90% homologous to all or a portion of SEQ ID No. 6.
[0352] H8.6. The TI host cell of H4 where the first locus comprises a sequence at least 90% homologous to all or a portion SEQ ID No. 4 and the secondary locus comprises at least one sequence at least 90% homologous to all or a portion of SEQ ID No. 7.
[0353] H9. The TI host cell of H4 where the first locus comprises a sequence at least 90% homologous to all or a portion SEQ ID No. 5 and the secondary locus comprises at least one sequence at least 90% homologous to all or a portion of SEQ ID No. 1, SEQ ID No. 2, SEQ ID No. 3, SEQ ID No. 4, SEQ ID No. 6, or SEQ ID No. 7.
[0354] H9.1. The TI host cell of H4 where the first locus comprises a sequence at least 90% homologous to all or a portion SEQ ID No. 5 and the secondary locus comprises at least one sequence at least 90% homologous to all or a portion of SEQ ID No. 1.
[0355] H9.2. The TI host cell of H4 where the first locus comprises a sequence at least 90% homologous to all or a portion SEQ ID No. 5 and the secondary locus comprises at least one sequence at least 90% homologous to all or a portion of SEQ ID No. 2.
[0356] H9.3. The TI host cell of H4 where the first locus comprises a sequence at least 90% homologous to all or a portion SEQ ID No. 5 and the secondary locus comprises at least one sequence at least 90% homologous to all or a portion of SEQ ID No. 3.
[0357] H9.4. The TI host cell of H4 where the first locus comprises a sequence at least 90% homologous to all or a portion SEQ ID No. 5 and the secondary locus comprises at least one sequence at least 90% homologous to all or a portion of SEQ ID No. 4.
[0358] H9.5. The TI host cell of H4 where the first locus comprises a sequence at least 90% homologous to all or a portion SEQ ID No. 5 and the secondary locus comprises at least one sequence at least 90% homologous to all or a portion of SEQ ID No. 6.
[0359] H9.6. The TI host cell of H4 where the first locus comprises a sequence at least 90% homologous to all or a portion SEQ ID No. 5 and the secondary locus comprises at least one sequence at least 90% homologous to all or a portion of SEQ ID No. 7.
[0360] H10. The TI host cell of H4 where the first locus comprises a sequence at least 90% homologous to all or a portion SEQ ID No. 6 and the secondary locus comprises at least one sequence at least 90% homologous to all or a portion of SEQ ID No. 1, SEQ ID No. 2, SEQ ID No. 3, SEQ ID No. 4, SEQ ID No. 5, or SEQ ID No. 7.
[0361] H10.1. The TI host cell of H4 where the first locus comprises a sequence at least 90% homologous to all or a portion SEQ ID No. 6 and the secondary locus comprises at least one sequence at least 90% homologous to all or a portion of SEQ ID No. 1.
[0362] H10.2. The TI host cell of H4 where the first locus comprises a sequence at least 90% homologous to all or a portion SEQ ID No. 6 and the secondary locus comprises at least one sequence at least 90% homologous to all or a portion of SEQ ID No. 2.
[0363] H10.3. The TI host cell of H4 where the first locus comprises a sequence at least 90% homologous to all or a portion SEQ ID No. 6 and the secondary locus comprises at least one sequence at least 90% homologous to all or a portion of SEQ ID No. 3.
[0364] H10.4. The TI host cell of H4 where the first locus comprises a sequence at least 90% homologous to all or a portion SEQ ID No. 6 and the secondary locus comprises at least one sequence at least 90% homologous to all or a portion of SEQ ID No. 4.
[0365] H10.5. The TI host cell of H4 where the first locus comprises a sequence at least 90% homologous to all or a portion SEQ ID No. 6 and the secondary locus comprises at least one sequence at least 90% homologous to all or a portion of SEQ ID No. 5.
[0366] H10.6. The TI host cell of H4 where the first locus comprises a sequence at least 90% homologous to all or a portion SEQ ID No. 6 and the secondary locus comprises at least one sequence at least 90% homologous to all or a portion of SEQ ID No. 7.
[0367] H11. The TI host cell of H4 where the first locus comprises a sequence at least 90% homologous to all or a portion SEQ ID No. 7 and the secondary locus comprises at least one sequence at least 90% homologous to all or a portion of SEQ ID No. 1, SEQ ID No. 2, SEQ ID No. 3, SEQ ID No. 4, SEQ ID No. 5, or SEQ ID No. 6.
[0368] H11.1. The TI host cell of H4 where the first locus comprises a sequence at least 90% homologous to all or a portion SEQ ID No. 7 and the secondary locus comprises at least one sequence at least 90% homologous to all or a portion of SEQ ID No. 1.
[0369] H11.2. The TI host cell of H4 where the first locus comprises a sequence at least 90% homologous to all or a portion SEQ ID No. 7 and the secondary locus comprises at least one sequence at least 90% homologous to all or a portion of SEQ ID No. 2.
[0370] H11.3. The TI host cell of H4 where the first locus comprises a sequence at least 90% homologous to all or a portion SEQ ID No. 7 and the secondary locus comprises at least one sequence at least 90% homologous to all or a portion of SEQ ID No. 3.
[0371] H11.4. The TI host cell of H4 where the first locus comprises a sequence at least 90% homologous to all or a portion SEQ ID No. 7 and the secondary locus comprises at least one sequence at least 90% homologous to all or a portion of SEQ ID No. 4.
[0372] H11.5. The TI host cell of H4 where the first locus comprises a sequence at least 90% homologous to all or a portion SEQ ID No. 7 and the secondary locus comprises at least one sequence at least 90% homologous to all or a portion of SEQ ID No. 5.
[0373] H11.6. The TI host cell of H4 where the first locus comprises a sequence at least 90% homologous to all or a portion SEQ ID No. 7 and the secondary locus comprises at least one sequence at least 90% homologous to all or a portion of SEQ ID No. 6.
[0374] H12. The TI host cell of H4 where the first locus is an integration sites within an LOC107977062 gene and the secondary locus is an integration site within a gene selected from the following group: LOC100768845, ITPR2, ERE67000.1, UBAP2, MTMR2, XP_003512331.2, and sequences at least about 90% homologous thereto.
[0375] H13. The TI host cell of H4 where the first locus is an integration sites within an LOC100768845 gene and the secondary locus is an integration site within a gene selected from the following group: LOC107977062, ITPR2, ERE67000.1, UBAP2, MTMR2, XP_003512331.2, and sequences at least about 90% homologous thereto.
[0376] H14. The TI host cell of H4 where the first locus is an integration sites within an ITPR2 gene and the secondary locus is an integration site within a gene selected from the following group: LOC107977062, LOC100768845, ERE67000.1, UBAP2, MTMR2, XP_003512331.2, and sequences at least about 90% homologous thereto.
[0377] H15. The TI host cell of H4 where the first locus is an integration sites within an ERE67000.1 gene and the secondary locus is an integration site within a gene selected from the following group: LOC107977062, LOC100768845, ITPR2, UBAP2, MTMR2, XP 003512331.2, and sequences at least about 90% homologous thereto.
[0378] H16. The TI host cell of H4 where the first locus is an integration sites within an UBAP2 gene and the secondary locus is an integration site within a gene selected from the following group: LOC107977062, LOC100768845, ITPR2, ERE67000.1, MTMR2, XP_003512331.2, and sequences at least about 90% homologous thereto.
[0379] H17. The TI host cell of H4 where the first locus is an integration sites within an MTMR2 gene and the secondary locus is an integration site within a gene selected from the following group LOC107977062, LOC100768845, ITPR2, ERE67000.1, UBAP2, XP_003512331.2, and sequences at least about 90% homologous thereto.
[0380] H18. The TI host cell of H4 where the first locus is an integration sites within an XP_003512331.2 gene and the secondary locus is an integration site within a gene selected from the following group: LOC107977062, LOC100768845, ITPR2, ERE67000.1, UBAP2, MTMR2, and sequences at least about 90% homologous thereto.
[0381] H19. The TI host cell of H4-H18 wherein the at least one exogenous nucleotide sequence incorporated at the first locus comprises a regulatable promotor.
[0382] H20. The TI host cell of H4-H18, wherein the at least one exogenous nucleotide sequence incorporated at the secondary locus comprises a regulatable promoter.
[0383] H21. The TI host cell of H4-H18, where the at least one exogenous nucleotide sequence incorporated at the first locus and the at least one nucleotide sequence incorporated at the secondary locus comprise a regulatable promoter.
[0384] J. A method of preparing a TI host cell expressing at least one polypeptide of interest comprising: providing a TI host cell comprising at least one exogenous nucleotide sequence integrated at a site within one or more loci of the genome of the TI host cell, wherein the one or more loci are at least about 90% homologous to a sequence selected from SEQ ID No. 1-7, wherein the at least one exogenous nucleotide sequence comprises two RRSs, flanking at least one first selection marker; introducing into the cell provided in a) a vector comprising two RRSs matching the two RRSs on the integrated exogenous nucleotide sequence and flanking at least one exogenous SOI and at least one second selection marker; introducing a recombinase or a nucleic acid encoding a recombinase, wherein the recombinase recognizes the RRSs; and selecting for TI cells expressing the second selection marker to thereby isolate a TI host cell expressing the at least one polypeptide of interest.
[0385] J1. A method for preparing a TI host cell expressing at least one first and second polypeptide of interest comprising: providing a TI host cell comprising at least one exogenous nucleotide sequence integrated at a site within one or more loci of the genome of the host cell, wherein one or more loci are at least about 90% homologous to a sequence selected from SEQ ID Nos. 1-7, wherein the exogenous nucleotide sequence comprises a first and a second RRS flanking at least one first selection marker, and a third RRS located between the first and the second RRS, and all the RRSs are heterospecific; introducing into the cell provided in a) a first vector comprising two RRSs matching the first and the third RRS on the at least one integrated exogenous nucleotide sequence and flanking at least one first exogenous SOI and at least one second selection marker; introducing into the cell provided in a) a second vector comprising two RRSs matching the second and the third RRS on the at least one integrated exogenous nucleotide sequence and flanking at least one second exogenous SOI; introducing one or more recombinases, or one or more nucleic acids encoding one or more recombinases, wherein the one or more recombinases recognize the RRSs; and selecting for TI cells expressing the second selection marker to thereby isolate a TI host cell expressing the at least one first and second polypeptides of interest.
[0386] J2. A method of preparing a TI host cell expressing a polypeptide of interest comprising: a) providing a TI host cell comprising at least one exogenous nucleotide sequence integrated at a site within one or more loci of the genome of the TI host cell, wherein the one or more loci are at least about 90% homologous to a sequence selected from SEQ ID No. 1-7, wherein the exogenous nucleotide sequence comprises one or more RRSs; b) introducing into the cell provided in a) a vector comprising one or more RRSs matching the one or more RRSs on the integrated exogenous nucleotide sequence and flanking at least one exogenous SOI and operably linked to at least one regulatable promoter; c) introducing a recombinase or a nucleic acid encoding a recombinase, wherein the recombinase recognizes the RRSs; and d) selecting for TI cells expressing the exogenous polypeptide of interest in the presence of an inducer to thereby isolate a TI host cell expressing the polypeptide of interest.
[0387] J3. A method for expressing a polypeptide of interest comprising: a) providing a host cell comprising at least one exogenous SOI flanked by two RRSs and a regulatable promoter integrated within a locus of the genome of the host cell, wherein the locus is at least about 90% homologous to a sequence selected from SEQ ID Nos. 1-7; and b) culturing the cell under conditions suitable for expressing the SOI and recovering a polypeptide of interest therefrom.
[0388] J4. A method for preparing a TI host cell expressing a first and second polypeptide of interest comprising: a) providing a TI host cell comprising an exogenous nucleotide sequence integrated at a site within a locus of the genome of the host cell, wherein the locus is at least about 90% homologous to a sequence selected from SEQ ID Nos. 1-7, wherein the exogenous nucleotide sequence comprises a first, second RRS and a third RRS located between the first and the second RRS, and all the RRSs are heterospecific; b) introducing into the cell provided in a) a first vector comprising two RRSs matching the first and the third RRS on the integrated exogenous nucleotide sequence and flanking at least one first exogenous SOI operably linked to a regulatable promoter; c) introducing into the cell provided in a) a second vector comprising two RRSs matching the second and the third RRS on the integrated exogenous nucleotide sequence and flanking at least one second exogenous SOI operably linked to a regulatable promoter; d) introducing one or more recombinases, or one or more nucleic acids encoding one or more recombinases, wherein the one or more recombinases recognize the RRSs; and e) selecting for TI cells expressing the first and second exogenous polypeptides of interest in the presence of an inducer to thereby isolate a TI host cell expressing the first and second polypeptides of interest.
[0389] J5. The method of any of claims J, J2, and J3, wherein the integration of a nucleic acid comprising at least one SOI is promoted by an exogenous nuclease.
[0390] J6. The method of claims J1 or J4, wherein the first SOI encodes a single chain antibody, an antibody light chain, an antibody heavy chain, a single-chain Fv fragment (scFv), or an Fc fusion protein; and the second SOI encodes a single chain antibody, an antibody light chain, an antibody heavy chain, a single-chain Fv fragment (scFv), or an Fc fusion protein.
[0391] J7. The method of J5, wherein the exogenous nuclease is selected from the group consisting of a zinc finger nuclease (ZFN), a ZFN dimer, a transcription activator-like effector nuclease (TALEN), a TAL effector domain fusion protein, an RNA-guided DNA endonuclease, an engineered meganuclease, and a clustered regularly interspaced short palindromic repeats (CRISPR)-associated (Cas) endonuclease.
[0392] J8. The method of any of claims J-J4, wherein the regulatable promoter is selected from the group consisting of SV40 and CMV promoters.
[0393] J9. The method of any of claims J2 and J4, wherein: the first vector further comprises a promoter sequence operably linked to the codon ATG positioned flanked upstream by the first SOI and downstream by an RRS; and the second vector further comprises a selection marker lacking an ATG transcription start codon flanked upstream by an RRS and downstream by the second SOI.
[0394] K. A vector comprising two nucleotide sequences at least 50% homologous to
[0395] a) two reference sequences selected from any portion of SEQ ID No. 1;
[0396] b) two reference sequences selected from any portion of SEQ ID No. 2;
[0397] c) two reference sequences selected from any portion of SEQ ID No. 3;
[0398] d) two reference sequences selected from any portion of SEQ ID No. 4;
[0399] e) two reference sequences selected from any portion of SEQ ID No 5;
[0400] f) two reference sequences selected from any portion of SEQ ID No. 6; or
[0401] g) two reference sequences selected from any portion of SEQ ID No. 7,
   wherein the two nucleotide sequences flank a DNA cassette, wherein the DNA cassette comprises at least one exogenous SOI operably linked to a regulatable promoter and flanked by two RRSs.
[0402] K1. The vector of K, wherein the vector comprises two nucleotide sequences at least 60% homologous to the two reference sequences.
[0403] K2. The vector of K, wherein the vector comprises two nucleotide sequences at least 70% homologous to the two reference sequences.
[0404] K3. The vector of K, wherein the vector comprises two nucleotide sequences at least 80% homologous to the two reference sequences.
[0405] K4. The vector of K, wherein the vector comprises two nucleotide sequences at least 90% homologous to the two reference sequences.
[0406] K5. The vector of K, wherein the vector comprises two nucleotide sequences at least 95% homologous to the two reference sequences.
[0407] K6. The vector of K, wherein the vector comprises two nucleotide sequences at least 99% homologous to the two reference sequences.
[0408] K7. The vector of any of K-K6, wherein the vector is selected from the group consisting of an adenovirus vector, an adeno-associated virus vector, a lentivirus vector, a retrovirus vector, an integrating phage vector, a non-viral vector, a transposon and/or transposase vector, an integrase substrate, and a plasmid.
[0409] K8. The vector of any of K-K7, wherein the SOI encodes a single chain antibody, an antibody light chain, an antibody heavy chain, a single-chain Fv fragment (scFv), or an Fc fusion protein.

### EXAMPLES

[0410] The following examples are merely illustrative of the presently disclosed subject matter and should not be considered as limitations in any way.

### Example 1: Discovering Highly Productive Targeted Integration Sites for CHO Host Cells for Clinical and Commercial Cell Line Development

[0411] This Example describes the methods for identifying targeted integration loci in the CHO genome having high productivity. Conventional cell line development (CLD) relies on the random integration (RI) of the plasmid carrying the sequence of interest (SOI). This process is unpredictable, and labor intensive. As such, a large effort is required to identify the high producing RI clones. Unlike the conventional RI CLD, targeted integration (TI) CLD introduces the transgene at a predetermined “hot-spot” in the CHO genome with a defined copy number (usually 1-2 copies). Given the low copy number and the pretested integration site, TI cell lines should have better stability compared to the RI lines. Moreover, since the selective marker is only used for selecting cells with proper TI and not for selecting cells with a high level of transgene expression, a less mutagenic marker may be applied to minimize the chance of sequence variants (SVs), which is in part due to the mutagenicity of the selective agents like methotrexate (MTX) or methionine sulfoximine (MSX).

[0412] FIG. 1 is a diagram showing an outline of the genome-wide screening steps for identifying CHO TI loci that allow for stable and high expression of antibodies. To screen for transcriptionally active sequences in the CHO genome, two approaches were utilized to introduce an antibody cassette, expressing either antibody A or antibody B, and where the antibody sequences were flanked by RRS1 and RRS2, into the CHO genome. One approach was the conventional random integration method, and the other was a transposase-based integration that required cotransfection of a transposase expressing plasmid and the antibody plasmid. 15k-20k transfectants were screened for each of the methods. Based on an intact IgG ELISA assay and gene copy analysis, a total of ˜300 clones with high antibody titer and low HC gene copy numbers were expanded for fed-batch evaluation in shake flasks. 40 clones, representing 40 potentially different highly transcriptionally active integration sites identified by the two methods, with acceptable titer and product quality attributes, were then selected for GFP landing pad swapping to generate TI hosts.

[0413] To replace the antibody cassette in the transcriptionally active loci, a landing pad that encoded a GFP gene and appropriate selection markers, flanked by the same RRS1 and RRS2, was constructed for RMCE. To initiate RMCE, the recombinase and the GFP landing pad were cotransfected into each of the 40 top clones. Two selection markers were used to enrich the targeted integration events. Successful RMCE should lead to the GFP landing pad being targeted to the transcriptionally active locus and replacing the antibody cassette, resulting in gain of GFP expression and loss of the antibody expression. The change in phenotype from GFP−/mAB+ to GFP+/mAb− should be readily detectable using FACS analysis. GFP+/mAb− enrichment was detected in 14 out of the 40 RMCE pools using FACS analysis. To isolate individual TI host candidates, each of these 14 RMCE pools was then single cell cloned. A total of 90 potential TI host candidates from the 14 pools were selected based on FACS and genomic PCR confirmation that the original antibody cassette was removed and replaced by the GFP landing pad at the integration sites of interest. Subsequently, some of these candidate hosts were evaluated for their RMCE capability and efficiency using a test antibody C flanked by the same RRS1 and RRS2. Two double selection schemes were utilized to generate the targeted antibody expressing population (FIGS. 2A and 2B), depending on which method the transcriptionally active locus was identified with. The configurations of the landing pads were slightly different for the two screening methods. Based on the RMCE efficiency as well as antibody productivity of the TI transfection pools, seven final hosts were selected, representing seven unique integration sites in the CHOKIM hosts for high antibody expression.

[0414] These seven hosts were analyzed by Targeted Locus Amplification/Next Generation Sequencing (TLA/NGS) to identify the CHO genomic sequences flanking the integration sites, thus providing the potential gene sequences the integration sites of interest reside in.

TABLE 2
TI host cell integration sites

| | | Contig | Integration | |
|---|---|---|---|---|
| Host | Contig | Size (kb) | site (bp) | Gene (SEQ ID No.) |
| 1 | NW_006874047.1 | 727 | 45269 | LOC107977062 (SEQ ID No. 1) |
| | (SEQ ID NO: 8) | | | |
| 2 | NW_006884592.1 | 931 | 207911 | LOC100768845 (SEQ ID No. 2) |
| | (SEQ ID NO: 9) | | | |
| 3 | NW_006881296.1 | 1016 | 491909 | ITPR2 (SEQ ID No. 3) |
| | (SEQ ID NO: 10) | | | |
| 4 | NW_003616412.1 | 127 | 79768 | ERE67000.1 (SEQ ID No. 4) |
| | (SEQ ID NO: 11) | | | |
| 5 | NW_003615063.1 | 372 | 315265 | UBAP2 (SEQ ID No. 5) |
| | (SEQ ID NO: 12) | | | |
| 6 | NW_006882936.1 | 3042 | 2662054 | MTMR2 (SEQ ID No. 6) |
| | (SEQ ID NO: 13) | | | |
| 7 | NW_003615411.1 | 277 | 97706 | XP_003512331.2 (SEQ ID No. 7) |
| | (SEQ ID NO: 14) | | | |

[0415] Based on the integration sites, 5′ flanking sequences can include: nucleotides 41190-45269 of NW_006874047.1, nucleotides 63590-207911 of NW_006884592.1, nucleotides 253831-491909 of NW_006881296.1, nucleotides 69303-79768 of NW_003616412.1, nucleotides 293481-315265 of NW_003615063.1, nucleotides 2650443-2662054 of NW_006882936.1, and nucleotides 82214-97705 of NW_003615411.1.

[0416] Based on the integration sites, 3′ flanking sequences can include: nucleotides 45270-45490 of NW_006874047.1, nucleotides 207912-792374 of NW_006884592.1, nucleotides 491910-667813 of NW_006881296.1, nucleotides 79769-100059 of NW_003616412.1, nucleotides 315266-362442 of NW_003615063.1, nucleotides 2662055-2701768 of NW_006882936.1, and nucleotides 97706-105117 of NW_003615411.1.

[0417] For two of the hosts, hosts 4 and 7, further analysis indicated that a single GFP landing pad was inserted into the CHO host genome. No antibody sequence was found in these two hosts, indicating the complete removal of the initial antibody cassettes used to identify the transcriptionally active loci. In addition, whole genome sequencing was performed in house for genomic DNA isolated from these two TI hosts. No antibody specific sequences were detected in these two TI hosts, while the GFP sequence (from the landing pad) was readily detected. More than 63× genome coverage was achieved for the TI hosts. To provide additional assurance of the absence of the antibody A and B in the TI hosts, multiple HCCF samples from TI cell lines expressing antibodies other than antibody A and B were evaluated using LC-MS study. The LC-MS data was analyzed using a similar approach to sequence variant analysis by LC-MS/MS, which has the ability to detect variant peptides at >0.5% level. No antibody A or B peptides were detected in all the samples harvested from the TI cell lines. Finally, a fluorescence in-situ hybridization (FISH) analysis was also performed by Chrombios to determine the chromosomal location of the GFP landing pad in the genome of these two TI hosts.

[0418] These two well-characterized TI hosts were further assessed for their RMCE robustness in clinical cell line development with a total of 16 different standard antibodies. FIG. 3 shows the productivity of the top clones generated by these TI hosts. Historically the average productivity of cell lines generated by random integration was ˜3 g/L. In most cases tested, TI cell lines showed comparable or better productivity than RI clones on average.

[0419] TI cell lines were expected to have better stability and lower SV than RI cell lines due to lower antibody gene copy number. For clone stability, monthly fed-batch production was set up monthly for 4 months to monitor productivity. Table 3 showed that only 10% of the TI cell lines generated by one of the TI hosts had greater than 20% titer drop after 120 days from PSB. Historically, 60% of the RI cell lines would have similar titer drops. This strongly suggests that the integration site identified is highly suitable for stable antibody expression. TI cell lines were also subjected to NAT-based sequence variant analysis. There were significantly lower frequency of SV >5% in the TI cell lines when compared with the RI cell lines (4% vs 15%, Table 3).

TABLE 3
Advantages of TI vs RI

| Characteristics | RI | TI |
|---|---|---|
| Copy# | Clone dependent | Low |
| Clone Stability | ~60% of clones | ~10% of clones |
| (>20% titer drop after | | |
| 120 days from FSB) | | |
| Sequence Variants (SVs) | ~15% of clones | ~4% of clones |
| (>5%) | | |

### Example 2: Two-Plasmid RMCE Strategy

[0420] To address the challenge of achieving high titer expression for standard antibody and expressing multi-chain complex formats, an innovative two-plasmid RMCE strategy was developed. The two-plasmid RMCE method allows 8 or more chains to be targeted to a TI site at the same time. This approach not only increases the flexibility of modulating HC and LC chain ratio of antibody to improve productivity, but also enables complex molecules with multiple chain as well as targeting transgenes, endogenous genes or RNAi with the antibody to modify cellular pathways.

[0421] The two-plasmid RMCE strategy involves using three RRS sites to carry out two independent RMCEs simultaneously (FIG. 4). Therefore, the GFP landing pad in the TI hosts described above was replaced to include a third RRS site (RRS3) that had no cross activity with either the RRS1 or RRS2 sites. The two expression plasmids to be targeted require the same flanking RRS sites for efficient targeting, one expression plasmid (front) flanked by RRS1 and RRS3 and the other (back) by RRS3 and RRS2. Since the two-plasmid RMCE efficiency is expected to be low, a stringent selection scheme is useful to enrich the rare RMCE specific events. At least two selection markers are needed in the two-plasmid RMCE. In certain embodiments three selection markers are employed, which one selection marker expression cassette split into two parts (see, e.g., FIG. 4). In certain embodiments involving a split selection marker expression cassette, the front plasmid would contain the promoter followed by a start codon and the RRS3 sequence. The back plasmid would have the RRS3 sequence fused to the N-terminus of the selection marker coding region, minus the ATG start. Additional nucleotides may need to be inserted between the RRS3 site and the selection marker sequence to ensure in frame translation for the fusion protein. Only when the two plasmids are correctly targeted would the full expression cassette of the selection marker be assembled thus rendering cells resistance to selection. FIG. 4 is the schematic diagram showing the two plasmid RMCE strategy. Of course, single-plasmid RMCE can still be carried out using RRS1 and RRS2, if needed.

[0422] To test the robustness of the two-plasmid RMCE approach, the original GFP landing pad was replaced by the new GFP landing pad with three RRS sites using a TI host identified previously, Host 4. A more severe viability dip and longer recovery time were observed for the two-plasmid RMCE compared to the single-plasmid RMCE, consistent with lower initial RMCE efficiency for the two-plasmid RMCE. Once the pools recovered, FACS, genomic PCR and gene copy analysis were assessed to confirm both plasmid cassettes were targeted correctly to the TI site. In total, five standard antibodies (Q, R, S, T, and U) were tested for productivity using both single-plasmid RMCE and two-plasmid RMCE (FIG. 5). In two-plasmid RMCEs, more total HC and LC copies were targeted to the TI site compared to single plasmid RMCE. In all five cases, productivities of the two-plasmid TI transfection pools were consistently higher, up to 200% increase compared to those of the single plasmid pools. The increase in titer in two-plasmid RMCE was mainly attributed to specific productivity, which saw its level improve by as much as 300% compared to that of single-plasmid RMCE.

[0423] Well-characterized TI hosts, e.g., Host 4, were further assessed in a different cell culture platform for their ability to achieve high titers of 5 different antibodies. FIG. 6 shows the productivity of these antibodies by these TI hosts. Productivity higher of 10 g/L was achieved at Day 14 and higher than 12 g/L at Day 16 for most of the antibodies.

[0424] To assess using two-plasmid RMCE to express complex mAb formats, two bispecific molecules that required four different chains (two HCs and two LCs) to be expressed in the same cell for bispecific assembly were tested. By enabling two separate expression plasmids to be targeted simultaneously, plasmid configuration of the different chains can be manipulated to achieve optimal chain ratios for balanced expression. In both cases, cell lines derived from Host 4 were developed having >1.5 g/L with >80% bispecific content (FIG. 7) using two-plasmid RMCE.

[0425] The day 14 titer of four bispecific molecules that required four different chains (two HCs and two LCs) to be expressed in the same cell for bispecific assembly was also evaluated. All the cell lines, which were derived from Host 4, were developed having >1.5 g/L titer (FIG. 8) with >80% bispecific content using two-plasmid RMCE.

### Example 3: Expression and Growth Analysis of RTI Cell Lines Expressing mAb-I (Difficult-to-Express) Vs. mAb-II (Average-Expressing) Antibody Molecules

[0426] A difficult-to-express molecule is defined as such when after several CLD attempts, all the generated cell lines achieve titers that are below what is usually expected from a standard CLD platform process. For one previously identified difficult-to-express antibody (mAb-I), for example, more than 120 cell lines from 4 separate CLD attempts were evaluated in the fed-batch production cultures. Yet, the highest mAb-I expressing cell lines could only achieve 50% of the typical titer when compared to an average antibody molecule (mAb-II), for which only 24 cell lines were screened (FIG. 9A table). Unfortunately, tracing the underlying cause(s) that might make a molecule difficult-to-express in a random integration system is very difficult, mainly due to the differences in transgene copy numbers and gene integration sites between different cell lines.

[0427] To identify the underlying factor(s) that made mAb-I difficult-to-express, CLD was initiated for both mAb-I and mAb-II molecules using a RTI system. Both HC and LC constructs were cloned into an expression vector under the inducible CMV-TO promoter control and these vectors were transfected into a TI host in order to increase the possibility of isolating cell lines with similar levels of transgene transcription. The overall schematic of the RTI CLD approach for mAb-I and mAb-II is depicted in FIG. 9B. Transfected cell lines were subjected to selection using two separate conditions, under which cell lines were either 1) derived in the presence of Dox (Induced), or 2) in the absence Dox (Not-Induced), throughout the CLD process. Cell lines derived in the absence of Dox were only temporarily induced to be ranked based on seed train titer or during production assays where indicated. This enabled the evaluation of the role of antibody expression (expression pressure) during the selection process (FIG. 9B).

[0428] Production assays were performed using two representative mAb-I and mAb-II cell lines, derived from Host 7, from both “Induced” and “Not-Induced” seed-train arms in the presence or absence of doxycycline. The latter was used to evaluate promoter leakiness and basal antibody production levels in the absence of induction. A rather tight regulation of antibody expression in the absence of doxycycline was observed, suggesting that the regulated expression system functioned effectively in these cell lines (FIGS. 10A and 10C). Growth (FIG. 10B) profiles of all cell lines in the presence or absence of doxycycline were comparable, although in the absence of doxycycline growth profiles appeared slightly better. Cell lines that were derived under “Induced” or “Not-Induced” seed-train conditions displayed relatively comparable titers and specific productivities during production (FIGS. 10A and 10C, compare cell lines 1&2 to 3&4 for mAb-I or mAb-II), indicating that constitutive antibody expression during selection did not play a significant role in isolation of high titer cell lines (FIG. 10). In addition, similar to the RI CLD attempts, titer and specific productivity of mAb-IRTI cell lines were still 50% lower than mAb-II RTI cell lines (FIGS. 10A and 10C). This observation ruled out chronic toxicity as a culprit for low expression of mAb-I, since both “Induced” and “Not-Induced” RTI cultures of mAb-I similarly displayed lower titers compared to the mAb-II control cell lines.

### Example 4: Lower Antibody Expression in mAb-I Cell Lines was not Due to Lower Transcription

[0429] To analyze lower antibody expression observed in mAb-I expressing cell lines, qRT-PCR experiments were performed to measure mRNA levels of antibody HC and LC in the RTI cell lines expressing mAb-I or mAb-II, under doxycycline induced and uninduced conditions. In the absence of Dox, mAb-I or mAb-II cell lines expressed little or no HC or LC mRNA, indicative of a relatively tight transcriptional regulation by the inducible promoter (FIG. 11). In the presence of Dox, antibody HC and LC transcription levels for mAb-I expressing cell lines were comparable to or higher than those of mAb-II expressing cell lines (FIGS. 11A and 11B). These results confirmed that a reduced level of transgene transcription was not the reason for low antibody expression in mAb-I expressing cell lines. Additionally, absence or presence of doxycycline in the seed-train cultures during CLD process had no impact on transgene transcription rates, since cell lines isolated under “Induced” or “Not-Induced” conditions had comparable HC or LC mRNA levels (FIGS. 11A and 11B).

### Example 5: Induction of mAb-I Expression Resulted in Reversible Accumulation of Intracellular BiP and Delayed Antibody HC Degradation

[0430] To identify the underlying factors affecting mAb-I expression, Dox induction along with cycloheximide (CHX) treatment and removal was used to investigate antibody secretion, folding and degradation. For these experiments, “Induced” cultures were treated with CHX to stop protein synthesis and after 5 hours, cells were washed and resuspended into media containing only Dox (no CHX), to resume protein synthesis (FIG. 12A). HC or LC were not detected in the supernatants of these cultures for approximately 60 min post CHX removal and a gradual increase in antibody secretion was only detected after 120 min and at similar rates (FIG. 12B, upper panels). This suggested that secretion of properly folded and assembled antibody molecules were comparable between mAb-I and mAb-II cell lines post CHX removal. The intracellular levels of antibody LC were also fairly comparable between mAb-I and mAb-II expressing cell lines (FIG. 12B, LC panels). However, significantly higher levels of intracellular antibody HC in mAb-I expressing cell lines were detected compared to mAb-II expressing lines, even after 5 hours of CHX treatment (FIG. 12B, HC panels). This implicated a delay or problem in degradation and clearance of unfolded or mis-folded antibody HC in mAb-I expressing cell lines. Interestingly, very high levels of intracellular BiP in the mAb-I were detected relative to the mAb-II cell lines before and after CHX treatment (FIG. 12B, lower panels, BiP). BiP as a chaperone has been implicated in the unfolded protein response (UPR) as well as antibody HC or LC folding, and its presence in the seed train culture could be an indicator of ER associated cellular stress.

[0431] To further investigate the correlation between mAb-I expression and intracellular BiP accumulation, “Induced” seed train cultures were treated with or without CHX overnight in media containing doxycycline and evaluated the intracellular HC, LC and BiP levels in these samples. In the absence of CHX treatment, the basal levels of intracellular antibody HC molecules were higher in mAb-I relative to mAb-II cell lines, while levels of intracellular LC were comparable between all sample sets. BiP levels on the other hand were considerably higher in mAb-I relative to mAb-II expressing cell lines (FIG. 12C, −CHX samples). Overnight treatment of these cultures with CHX resulted in a reduction in levels of HC and LC in all cell lines, along with a concurrent reduction in BiP levels specifically in mAb-I expressing cell lines (FIG. 12C, +CHX samples). This was in agreement with previous findings (FIG. 12B). Since cycloheximide inhibits synthesis of all eukaryotic proteins indiscriminately, the higher BiP levels in mAb-I cell lines could not be directly linked to accumulation of antibody HC or LC subunits. However, the regulated expression system offered the ability to directly test the link between intracellular BiP and antibody HC or LC levels. To that end doxycycline was removed from the media for 6 days, to specifically turn off antibody expression without affecting expression of other endogenous proteins, and monitored intracellular HC, LC, and BiP levels. A direct and specific link between antibody (HC and LC) expression and accumulation of intracellular BiP for mAb-I cell lines was observed, while expression of mAb-II showed no effects on intracellular BiP levels (FIG. 12D).

### Example 6: Although mAb-I LC Expression Triggered Intracellular BiP Accumulation, mAb-I HC Also Distinctly Contributed to Low Expression of this Antibody

[0432] To determine whether mAb-I LC played a role in accumulation of intracellular BiP, a construct was generated that expressed mAb-I HC under a regulated promoter while LC was expressed constitutively. This construct along with constructs expressing regulated HC/LC of mAb-I or mAb-II (controls) were transfected into the CHO cells and two separate pools from each transfection were derived. Pool titers were evaluated in production culture (FIG. 13A) while seed train cultures were evaluated by Western blot analysis (FIG. 13B) in the presence and absence of doxycycline. During production assay, each pool was induced with Dox or remained uninduced. Uninduced pools expressed very little antibody during production, indicative of a tight expression regulation (FIG. 13A, −Dox). Analysis of Dox induced cultures during production revealed that the regulated-HC/constitutive-LC mAb-I expressing pools derived from “Not-induced” seed train cultures had considerably lower titers relative to the regulated HC/LC mAb-I pools and regulated-HC/constitutive-LC mAb-I pools that were “Induced” during seed train (FIG. 13A). Western blot analysis of “Not Induced” cultures showed that under all conditions antibody HC was expressed only when Dox was added to the media. In addition, constitutive expression of mAb-I LC alone, without the mAb-I HC, triggered accumulation of intracellular BiP (FIG. 13B). These results implied a direct connection between expression of mAb-I LC subunit and accumulation of the intracellular BiP. When constitutively expressed in the absence of HC, the LC molecules of mAb-I likely form unfolded aggregates within the ER that interact with BiP chaperone, triggering an increase in intracellular levels of BiP in these cells. Expression of mAb-I HC during production phase could have further burdened these cells, increasing the demand for intracellular BiP to accommodate folding of both HC and LC molecules, resulting in inefficient antibody assembly, folding and secretion efficiency (FIG. 13A).

[0433] While these findings pointed to a connection between mAb-I LC expression and cellular ER stress, as indicated by accumulation of intracellular BiP, a direct connection between expression of mAb-I LC and low titers of mAb-I cell lines needed to be established. To that end, antibody molecules were generated where mAb-I and mAb-II heavy and light chains were swapped to generate HC_{I}LC_{I}, HC_{I}LCH_{I}, HC_{I}LCH_{I}, and HC_{II}LC_{I} antibody combinations. HC_{II}LC_{I} construct expressed an antibody with mAb-I HC and mAb-II LC, while HC_{II}LC_{I} construct expressed an antibody with mAb-II HC and mAb-I LC. Antibody HC and LC expression for all these constructs were under the control of CMV-TO promoter in the RTI vector system (FIG. 13C). These constructs were then transfected into our CHO TI host cells and two separate RTI pools, for each construct, were generated and expression of mAb-I, or mAb-II, or the hybrid versions of these antibodies were tested. As previously noticed (FIG. 13B), a clear and direct correlation between mAb-I LC expression and accumulation of intracellular BiP was observed (FIG. 13D, LC and BiP blots). Interestingly, intracellular BiP was also accumulated in a less intense but yet noticeable manner in pools expressing HC_{I}LC_{II} hybrid antibody compared to HC_{II}LC_{II}, hinting towards some levels of ER stress in these pools, likely due to expression of HC_{I} (FIG. 13D, compare long exposure BiP levels in HC_{II}LC_{II} and HC_{I}LC_{I} samples). Turning off antibody expression via Dox removal resulted in reduction of intracellular BiP levels in all RTI pools except for mAb-II (HC_{B}LC_{B}) pool, where the initial levels of both intracellular HC and BiP were considerably lower even prior to Dox removal (FIG. 13D, compare HC and BiP levels at Day 0 in HC_{II}LC_{II} pools to other pools).

[0434] To evaluate the role of mAb-I HC and LC on overall antibody expression, the HC_{I}LC_{I}, HC_{I}LCH_{I}, HC_{I}LC_{II}, and HC_{II}LC_{I} RTI pools were evaluated in production assays. In the absence of doxycycline, all the RTI pools expressed little antibody, exhibiting a tight regulation of antibody expression (FIG. 14A, −Dox). Growth rates for all the RTI pools were similar, with the induced cultures having slightly lower growth rates relative to the uninduced cultures (FIG. 14B). As previously observed, the mAb-I and mAb-II RTI pools had the lowest and highest titers and specific productivities, respectively (FIGS. 14A and 14C). Interestingly, both HC_{II}LC_{I} and HC_{I}LC_{I} RTI pools displayed titers and specific productivities that were higher than HC_{I}LC_{I} but lower than HC_{II}LC_{II} RTI pools (FIGS. 14A and 14C). These results indicated that both mAb-I HC and LC subunits individually contributed to the lower expression of this antibody relative to the mAb-II. Contrary to our expectations, hybrid RTI pools that expressed LC_{I} subunit had slightly higher titers and specific productivities compared to the pools expressing HC_{I} subunit (FIGS. 14A and 14C). This indicated that mAb-I HC played a slightly more significant role in the lower expression of this antibody relative to the LC subunit. It was the use of antibody chain swap approach in combination with the RTI system that revealed the negative effects associated with the expression of mAb-I HC subunit, even when a clear indicator of biological stress (such as intracellular BiP accumulation) could not be identified.

### Example 7: Amino Acid Sequence Differences Between mAb-I and mAb-II HC and LC Subunits

[0435] To assess whether certain amino acids residues might contribute to the problematic expression of mAb-I HC and LC, the amino acid sequences of mAb-I and mAb-II LC (FIG. 15A) and HC (FIG. 15B) subunits were aligned. The amino acid composition for all CDR regions of mAb-I and mAb-II HC and LC molecules were different from each other, as they were developed to target different antigens. In the LC subunit, there are no amino acid sequence differences between mAb-I and mAb-II molecules for the rest of the variable and all of the constant regions. The CDR1 segment of LC_{I} is 6 amino acids longer than LC_{I}, while CDR3 segment of LC_{I} is one amino acid longer than LC_{I} (FIG. 15A). As for the antibody HC subunit, excluding the CDR segments, the rest of the variable and constant regions of HC_{I} and HC_{II} are identical with the exception of 4 amino acids residues (FIG. 15B). Two of these amino acid changes were fairly conservative (T->S and L->A) and hence unlikely to contribute to the low expression of HC_{I}. The N->G change in HC_{I} prevents antibody HC glycosylation. Hence, the effects of N->G and Y->V amino acid differences between HC_{II} and HC_{I} on expression of HC_{I} were investigated. Two point mutations were generated, changing the G and V amino acid residues of HC_{I} to N and Y, respectively (HC_{A} double mutant or HC_{I}dm). The HC_{I}dm was used along with LC_{I} and LC_{I} to generate RTI pools and antibody expression in these pools were evaluated in production cultures (FIG. 16A). The findings showed that co-expression of HC_{I}dm along with LC_{I} increased antibody expression to the levels observed for HC_{H}LC_{II}, suggesting that these mutations can restore the low expression levels of HC_{A} antibody (FIG. 16A). Interestingly, when co-expressed with LC_{I}, HC_{I}dm achieved titers even higher than that of HC_{II}LC_{II}, suggesting that HC_{I}dm is superior in expression and folding compared to HC_{II} (FIG. 16A). As previously observed, HC_{I}LC_{I} had the lowest titer while HC_{I}LC_{II} displayed an intermediate antibody expression profile (FIG. 16A). Western blot analysis revealed that expression of LC_{I} was still associated with increased intracellular BiP accumulation, even when co-expressed with HC_{I}dm (FIG. 16B). FIG. 16C depicts a diagnostic roadmap of how RTI system can be used to dissect and identify the source of problem in cell lines that express hard to express molecules.

### Example 8: Generation of TI Host Cell Containing Two Distinct and Independent Landing Pads

[0436] Host 8 is a targeted integration (TI) host containing two distinct and independent landing pads, which can be targeted for expression of antibody genes individually, or simultaneously. The parental cell line for Host 8 is Host 7 (see Table 2) which contains a single landing pad. A second landing pad was inserted into Host 8 at the genomic location where the landing pad is located in the Host 4 TI host (see Table 2). This insertion was performed by CRISPR/Cas9-based knock-in of a new landing pad into the Host 4 TI site location within the Host 7 TI host.

[0437] To accomplish this, the genomic region of Host 4 TI site was characterized within the TI Host 4 and the TI Host 7. Based on this information, a guide RNA was constructed to target this specific genomic region to facilitate CRISPR/Cas9-based knock-in. Separately, a donor plasmid containing a newly created landing pad was generated to be knocked-in to this site and constructed together with homology arms corresponding to the genomic region upstream and downstream of the targeted knock-in site to facilitate knock-in, and additional genes to allow for screening of knock-in clones. Co-transfection of a plasmid containing genes for the gRNA and Cas9, and the donor plasmid were performed to facilitate the CRISPR/Cas9-based knock-in of the new landing pad.

[0438] Following selection and screening of clones that underwent CRISPR/Cas9-based knock-in, Host 8 was ultimately identified and underwent further evaluation. The existing Host 7 landing pad was determined to be intact, and the newly knocked-in landing pad at the Host 4 site location was also confirmed to be present, intact, and in the correct location.

[0439] The feasibility of recombinase-mediated cassette exchange (RMCE) at both sites was then evaluated for each site individually, and then simultaneously. Clones were generated by RMCE at the Host 7 landing pad only, the Host 4 landing pad only, and both sites simultaneously, and then evaluated in a 14-day fed-batch shake flask evaluation. Titer and specific productivity of the clones expressing antibody at both sites simultaneously was higher compared to expression at each site individually. Further evaluation was performed in a different cell culture process, cell culture platform B, to show additional titer increase for all clones in comparison to the cell culture platform A (FIG. 17). The average 14-day titer for the Host 4 site was 3.0 g/L, for the Host 7 site was 1.9 g/L and for both sites simultaneously was 3.9 g/L at the platform A cell culture.

[0440] Ultimately, TI Host 8 was created from TI Host 7 by addition of a second landing pad located at the genomic location of the landing pad of the TI Host 4. Further investigation confirms knock-in of the landing pad and feasibility of RMCE at both, existing and new, landing pads. Further, evaluation of clones generated from Host 8 at each site individually and both sites simultaneously show productivity of antibody expression. The expression of antibody genes at both sites simultaneously, versus each individual site, have an additive productivity effect which is seen in both the cell culture platform A and in the cell culture platform B (FIG. 17).

### Methods

[0441] Antibody Plasmid DNA Construct Configurations: To construct one-plasmid antibody constructs, antibody HC and LC fragments were cloned into a vector backbone containing the L3 and 2L sequences as well as a puromycin N-acetyl-transferase (pac) selectable marker. To construct two-plasmid antibody constructs, antibody HC and LC fragments were cloned into a front vector backbone containing L3 and LoxFAS sequences, and a back vector containing LoxFAS and 2L sequences and a pac selectable marker. The Cre recombinase plasmid pOG231 (Wong E T et al., Nucleic Acids Res 2005, 33, (17), e147; O'Gorman S et al., Proc Natl Acad Sci USA 1997, 94, (26), 14602-7, the contents of each are incorporated herein by reference) was used for all RMCE processes.

[0442] Cell Culture: CHO cells were cultured in a proprietary DMEM/F12-based medium in 125 mL shake flask vessels shaking at 150 rpm, 37° C. and 5% CO₂. Cells were passaged at a seeding density of 3×10⁵ cells/mL every 3-4 days.

[0443] RMCE Stable Cell Line Development: Expression plasmids were transfected into TI hosts by MaxCyte STX® electroporation (MaxCyte, Gaithersburg, MD). RMCE transfection pools were then selected with puromycin and 1-(2′-deoxy-2′-fluoro-1-beta-D-arabinofuranosyl-5-iodo) uracil (FIAU) (Moravek). After pool selection, single cell cloning (SCC) was performed to generate TI cell lines for further evaluation.

[0444] Fed-Batch Production Assay: Fed-batch production cultures were performed in shake flasks or ambr15 vessels (Sartorius Stedim) with proprietary chemically defined production medium. Cells were seeded at 1×10⁶ cells/ml on day 0, with a temperature shift from 37° C. to 35° C. on day 3. Cultures received proprietary feed medium on days 3, 7, and 10. Viable cell count (VCC) and percent viability of cells in culture was measured on days 0, 3, 7, 10, and 14 using a Vi-Cell™ XR instrument (Beckman Coulter). Glucose and lactate concentrations were measured on days 7, 10 and 14 using a Bioprofile 400 Analyzer (Nova Biomedical). Day 14 titers were determined using protein A affinity chromatography with UV detection.

[0445] Gene copy number determination by droplet PCR: Droplet PCR assays were performed using ddPCR™ Supermix kit (Bio-Rad). Each ddPCR reaction containing ddPCR Master mix, 900 nM forward primer, 900 nM reverse primer, 250 uM probe, 3 unit HaeIII restriction enzyme and sample DNA. After incubation at room temperature for 10 min, the droplets were generated with Automatic Droplet Generator (Bio-Rad). The PCR thermal cycling conditions were 10 min at 95° C., followed by 40 cycles of 94° C. for 30 sec and 60° C. for 1 min, then 98° C. for 10 min to deactivate the enzyme. After PCR reactions, the droplets were read on the QX200™ Droplet reader (Bio-Rad). The data were collected and analyzed using Quantasoftware. The HC and LC gene copy numbers were normalized based on the defined copy number of reference genes Bax, Albumin, Hprt and b-microglobulin. The primers used in this study were designed using Primer Express v3.0 (Life Technologies). The sequences of the primers are listed in Table 4.

TABLE 4
Primer sequences for droplet PCR.

| Primers | Sequence |
|---|---|
| Heavy Chain-Forward Primer | TCA AGG ACT ACT TCC CCG AAC C |
| Heavy Chain-Reverse Primer | TAG AGT CCT GAG GAC TGT AGG ACA |
| | GC |
| Heavy Chain-Probe | VIC-ACG GTG TCG TGG AAC TCA GGC |
| | GC-TAMRA |
| Light Chain-Forward Primer | GCT GCA CCA TCT GTC TTC ATC T |
| Light Chain-Reverse Primer | GCA CAC AAC AGA AGC AGT TCC A |
| Light Chain-Probe | VIC-CCC GCC ATC TGA TGA GCA GTT |
| | GAA-TAMRA |
| Bax-Forward Primer | ACA CTG GAC TTC CTC CGA GA |
| Bax-Reverse Primer | GCA TTA GGA AGT TTG AGA ACC A |
| Bax-Probe | FAM-CCC AGC CAC CCT GGT CTT |
| | GG-TAMRA |
| Albumin-Forward Primer | TTC GTG ACA GCT ATG GTG AAC TG |
| Albumin-Reverse Primer | GGT CAT CCT TGT GTT TCA GGA AA |
| Albumin-Probe | FAM-CTG TGC AAA ACA AGA ACC CGA |
| | AAG AAA CC-TAMRA |
| Hprt-Forward Primer | AAA GGA CAT AAT TGA CAC TGG TAA A |
| Hprt-Reverse Primer | CAA TTG CTT ATT GCT CCC AA |
| Hprt-Probe | FAM-CTG CTT TCC CTG GTC AAG CGG- |
| | TAMRA |
| β-microglobulin-Forward Primer | CTT CCT GAA CTG CTA TGT GTC TCA A |
| β-microglobulin-Reverse Primer | CCA TCT TCT TTC CAT TCT TCA ACA |
| β-microglobulin-Probe | VIC-TTC ATC CCC CCC AAA TTG AAA |
| | TCG A-BHQ1 |

[0446] Quantitative Real Time PCR (qRT-PCR or Taqman) Analysis: RNA samples from seed train cultures were purified using Qiagen RNeasy plus mini kit according to the manufacturer's instructions. TaqMan RT-PCR assays were performed using TaqMan One® Step RT-PCR Master mix kit (Life Technologies). Each RT-TaqMan PCR reaction contained RT-PCR Master mix, reverse transcriptase, 300 nM forward primer, 300 nM reverse primer, 100 nM probe, and 10 ng purified RNA sample. The thermal cycling conditions were 30 min at 48° C. and 10 min at 95° C., followed by 40 cycles of 95° C. for 15 sec and 60° C. for 1 min. All reactions were processed on the 7900 HT Fast Real Time PCR System (Life Technologies). Data were analyzed using SDS v2.4 software (Life Technologies) after TaqMan RT-PCR amplification. The relative expression levels of HC and LC were determined based on the delta Ct analysis method. The expression level of a house keeping gene, cyclophilin, was used as reference gene to normalize different RNA samples in each reaction. The primers used in this study were designed using primer express v3.0 (Life Technologies). The sequences of primers are listed in Table 5.

TABLE 5
Primer sequences for Quantitative Real Time PCR

| Primers | Sequence |
|---|---|
| Heavy Chain-Forward Primer | TCA AGG ACT ACT TCC CCG AAC C |
| Heavy Chain-Reverse Primer | TAG AGT CCT GAG GAC TGT AGG ACA GC |
| Heavy Chain-Probe | FAM-ACG GTG TCG TGG AAC TCA GGC |
| | GC-TAMRA |
| Light Chain-Forward Primer | TGA CGC TGA GCA AAG CAG AC |
| Light Chain-Reverse Primer | CAG GCC CTG ATG GGT GAC |
| Light Chain-Probe | FAM-ACG AGA AAC ACA AAG TCT ACG |
| | CCT GCG A-TAMRA |
| Hamster Cyclophilin-Forward Primer | GCG TTT CGG GTC CAG GA |
| Hamster Cyclophilin-Reverse Primer | GAG TTG CCC ACA GTC GGA A |
| Hamster Cyclophilin-Probe | FAM-TGG CAA AAC CAG CAA GAA GAT |
| | CAC CA-TAMRA |

[0447] Western Blot analysis: Cell pellets from seed train cultures were washed with PBS and resuspended in NP-40 lysis buffer with the mini cOmplete™ cocktail of protease inhibitors (Roche). Cell lysates were centrifuged at 13000 RPM for 10 minutes and the supernatants were collected. Protein concentration for each lysate was determined using the Pierce BCA Protein Assay Kit (Thermo Scientific). Equal protein concentrations of each lysate were mixed with SDS-PAGE buffer and NuPage Sample Reducing Agent (Invitrogen) before being heat-denatured for 5 minutes at 95° C. The lysates were then loaded onto NuPage precast 4-12% Bis-Tris gels (Invitrogen) and electrophoresed. Protein was transferred onto nitrocellulose membranes using the iBlot system (Invitrogen). The membranes were blocked for 1 hour at room temperature using 5% nonfat milk solution in tris-buffered saline containing 0.1% Tween 20 (TBS-T). After blocking, membranes were incubated for 1 hour at room temperature using specific primary antibodies and then washed 3 times for 10 minutes with TBS-T. Secondary horseradish peroxidase conjugated antibody was added for 1 hour at room temperature, followed by 3 15-minute washes with TBS-T. Membranes were developed using either the Amersham ECL detection reagent or Amersham ECL Prime detection reagent (GE Life Sciences). Image Lab 5.1 (Biorad) was used for band signal quantification. The following primary antibodies were used: 1:3000 goat anti-human IgG-HRP (MP Biomedicals) and 1:2500 mouse anti-β actin (Sigma Alrdich). The following secondary antibody was used: 1:10000 sheep anti-mouse (GE Healthcare UK).

### Example 9: Addition of an Extra Light Chain to the One Heavy, One Light Chain Plasmid DNA Configuration Improves Antibody Titer and Specific Productivity

[0448] To examine the effect of antibody copy number on productivity in the TI host, RMCE pools were generated by transfecting a single plasmid containing either one heavy and one light chain (HL configuration) or one heavy and two light chains (HLL configuration). After selection, recovery, and verification of RMCE by flow cytometry, the pools' productivity was evaluated in a 14-day fed batch production assay. For three separate antibodies (mAb-Q, mAb-S, and mAb-T) an approximately 2-fold increase in titer for the HLL pools compared to the HL pools was observed, driven largely by a 1.5-2.5-fold increase in specific productivity (FIGS. 18A and 18B). Additional single cell clones were generated from the transfected pools by using limiting dilution and confirmed that titer and specific productivity are also higher in HLL configuration derived clones than those from the HL configuration (FIG. 18C, 18D).

### Example 10: Transfection with Up to Seven Antibody Chains in RMCE Pools Increases Antibody Specific Productivity and Titer

[0449] The effect of increasing the antibody chain number on expression of the antibody was evaluated. The HLL single plasmid configuration was compared to the HLL-HL or HLL-HLL dual plasmid configurations for five antibodies.

[0450] The HLL-HL (five-chain), HLL-HLL (six-chain) and HLL-HLHL (seven-chain) configurations for mAb Y were compared. Titer and Qp of RMCE pools in production generally increased from the HLL-HL to HLL-HLL and HLL-HLHL configurations (FIG. 19A, 19B), while growth (represented as the integral of viable cell count, IVCC) among the different pools was relatively equivalent (FIG. 19C). Looking at seed train antibody mRNA expression in these pools, an increase in light chain mRNA going from HLL-HL to HLL-HLL and HLL-HLHL, as well as increased heavy chain mRNA in the HLL-HLHL pool compared to HLL-HL and HLL-HLL pools was observed (FIG. 19D). The intracellular protein levels of heavy chain and light chain from these RMCE pools were also measured using western blot. Intracellular light chain protein levels closely matched what was observed for light chain mRNA, with increases from the five to six and seven chain configurations (FIGS. 19E, 19F).

### Example 11: Single Cell Clones with the Seven Chain HLL-HLHL Configuration have High Titer and Specific Productivity in Two Tested Antibodies

[0451] To evaluate whether the high titer and productivity of the seven chain configuration HLL-HLHL is maintained after single cell cloning, single cell monoclones from the HLL-HL, HLL-HLL, and HLL-HLHL RMCE pools of mAb Y were generated. These monoclones were then evaluated in a 14 day fed-batch production assay. Looking at the top 6 clones from each configuration, it was found that titer and Qp increased slightly from the HLL-HL configuration to HLL-HLL and HLL-HLHL (FIG. 20A, 20B), as growth remained similar (FIG. 20C).

[0452] To confirm that the HLL-HLHL configuration results in high monoclone titer, a different mAb, mAb III was used to generate single cell clones, derived from Host 4, from HLL-HL (five-chain) and HLL-HLHL (seven-chain) RMCE pools. After evaluation in a 14 day fed batch production assay, a clear titer advantage of the HLL-HLHL clones over the HLL-HL clones was observed (FIG. 20D), greater than that seen with mAb U. The titer increase appeared to be driven primarily by the higher Qp of the HLL-HLHL clones (FIG. 20E), with little average difference in IVCC between the two configurations (FIG. 20F).

### Example 12: Antibody Chain Position in a Transfected Plasmid Affects its Productivity

[0453] The effect of the position or arrangement of heavy chain and light chain in the transfected plasmids on antibody expression was also evaluated. To do this, RMCE pools were generated with plasmids containing several different configurations of one heavy chain and one light chain of mAb Z. Since the TI hosts of the present disclosure support integration of two different plasmids at the same integration site, the position effect when both heavy chain and light chain are expressed from the same plasmid as well as when they are separated on either front or back different plasmids was examined (FIG. 21A).

[0454] After generating the RMCE pools, the mRNA expression level of antibody Z heavy chain and light chain in seed train cultures were measured. The mRNA expression of heavy chain decreased when it was preceded by light chain, with the LH configuration in both front and back plasmids having lower heavy chain mRNA expression than the HL configuration. However, the effect of position on light chain was dependent on which plasmid it was expressed from: in the front plasmid, light chain mRNA expression increased in the LH configuration vs. HL but the opposite was true in the back plasmid. It was also observed that while a light chain cassette on its own in the front plasmid expressed a high level of light chain mRNA, a single light chain cassette in the back plasmid had the lowest light chain mRNA levels of any configuration (FIG. 21B). In general, lower mRNA expression levels for both heavy and light chain in the back plasmid compared to the front plasmid were observed.

[0455] A fed-batch production assay of these different RMCE pools produced a range of titers and specific productivities similar to the trend in antibody mRNA expression (FIG. 21C, 21D). The LH-no mAb configuration had higher Qp and titer than HL-no mAb, while the pools with the lowest level of LC mRNA expression—H-L and no mAb-LH—also had the lowest Qp and titer.

[0456] To confirm that the observed mRNA and antibody productivity differences are due to antibody chain position and not variation in absolute copy number, digital droplet PCR was used to measure the pools' heavy and light chain copy number. As expected, all pools had approximately one heavy and one light chain DNA copy (FIG. 21E).

### Example 13: Effect of HC to LC Ratio on the % High-Molecular-Weight Species on mAbs

[0457] The effect of the HC:LC ratio of antibodies on productivity and on High-molecular-weight species (HMWS), such as aggregates, was evaluated. Furthermore, the effect on the TI site was evaluated by using cells with different TI sites. To do this, RMCE pools were generated by transfecting a single plasmid containing either one heavy and one light chain (HL configuration) or one heavy and two light chains (HLL configuration) in TI Host 4 or Host 7 locations. The pools' productivity was evaluated in a 14-day fed batch production assay (FIGS. 22A and 22B). The % HMWS was evaluated (FIGS. 22B and 22D) showing that the effect of HC:LC ratio is independent of the integration site.

[0458] The effect of increasing the LC copy of and antibody on the productivity and on High-molecular-weight species (HMWS) was evaluated, in connection with mAb IV. To do this, RMCE pools were generated by transfecting a single plasmid containing either one heavy and one light chain (HL configuration), one heavy and two light chains (HLL configuration), two heavy and three light chains (HLL-HL configuration), two heavy and four light chains (HLL-HLL configuration), two heavy and five light chains (HLL-HLLL configuration), three heavy and 6 light chains (HLLL-HLLHL configuration), or three heavy and 7 light chains (HLLL-HLLHLL configuration) in Host 4 site location or in Host 4 and 7 site location (FIGS. 23 and 24).

[0459] Through a number of titer and production evaluation assays, a number of clones were identified and evaluated in an ambr15 production evaluation with a specific production process. From this evaluation, the top 10 clones, identified by cell culture performance, titer, and product quality attributes (including percent aggregation), were chosen to be banked for further evaluation. Ultimately, 2-site integration cell lines were generated expressing mAb-VI with high titer, lower percent aggregation, and comparable production quality to previously generated mAb-VI cell lines. FIG. 25 shows the top 2 clones with titers of 8.4 and 8.7 g/L with 7.4% and 5.6% aggregates, respectively.

### Example 14: Regulated Targeted Integration: Clone Evaluation

[0460] In this experiment the expression of antibody Z, in a regulated derivative of Host 4, was evaluated after the regulated targeted integration of a sequence encoding the antibody was performed. The system employed for the regulation of the expression of antibody Z is composed of 3 key components: 1) Regulated promoters that include tandem tet-operon sequences prior to a signal sequence, 2) Promoter and Tet-repressor protein coding sequences, and 3) an inducer, such as doxycycline, to allow for expression of antibody Z.

[0461] Upon confirmation that targeted integration of the sequence encoding antibody Z, clone evaluation was performed in a shake flask process A 10% feed (of the total volume) on days 3, 7 and 10 was performed. One production culture assay was carried out to evaluate the clones. All clones were inoculated at a seeding density of 3×10⁶ cells/mL on day 0. On days 3, 7, and 10, 1 μg/mL doxycycline was added to all 36 cultures to induce expression of antibody Z.

[0462] Final titers and specific productivity (Qp) are shown in FIGS. 26 and 27 respectively. Day 14 Harvest Cell Culture Fluid (HCCF) was submitted to titer analysis. Titers ranged from 1 to 3.68 g/L (excluded clone 7). Clone selection for banking was first ranked by titer and final selection was based on cell culture performance, including Qp and other parameters. The selected clones for banking produced titers ranging from 2.69 to 3.68 g/L.

[0463] In addition to the various embodiments depicted and claimed, the disclosed subject matter is also directed to other embodiments having other combinations of the features disclosed and claimed herein. As such, the particular features presented herein can be combined with each other in other manners within the scope of the disclosed subject matter such that the disclosed subject matter includes any suitable combination of the features disclosed herein. The foregoing description of specific embodiments of the disclosed subject matter has been presented for purposes of illustration and description. It is not intended to be exhaustive or to limit the disclosed subject matter to those embodiments disclosed.

[0464] It will be apparent to those skilled in the art that various modifications and variations can be made in the compositions and methods of the disclosed subject matter without departing from the spirit or scope of the disclosed subject matter. Thus, it is intended that the disclosed subject matter include modifications and variations that are within the scope of the appended claims and their equivalents.

[0465] Various publications, patents and patent applications are cited herein, the contents of which are hereby incorporated by reference in their entireties.

The application's sequence listing, which the Patent Office published only in electronic form, follows.

SEQUENCE LISTING (14 sequences)

SEQ ID NO: 1 - DNA, 3974 bp, Cricetulus griseus
  source 1..3974: mol_type = other DNA
cgcgacaccgattctcactctcatttggagttgggctctgagataatccaatcactgtcgctctggtttgtaaatttgcccaagatctgcccagaaccagactctcagtgtccccaaggatgggggccactgtgcaccctgctctcctcctgctgcttgcagaccctgtgttctgggctccaacccgcgcaggtgagtgccacccaggggaaaaatggcctcggcggcaaggggtgggggcggcacccgggaagccgcatcttccaaactctcagccagaactttcagatccattctccacctgcatccctagacccgtgccctgctcccttaccagcccggtgcacctgccaagaggtgcgggtctcaccgctcaccgcccccaggctcacactcgctgctgtatttctacaccaccgtgtcccggcccggcctcggggatccccggttcattttcgtgggctacgtggacgacacgcagttcgtgcgcttcgacagcgacgcggagacgcccagagtggagccctgtgtagggtggatggaacaggagaggcctgagtattgggagctgcagacccagatggcctggactcaagcaaagctgtccggtgggagcctgatgaccctgcttcgctatttcaaccagagcaaggacggtgagtgacccagacactttgggagcaccaaggttgtccagattcactggactggagtatcaccctagacctgcccggttcgttaagcagaaaagggcccgcagggattcgcttggacttggtctgaagttagtggtgctgcgcttcctaagagggctgaccaccttgtccccgctagactctcacacgctgcaggggatgcgtggttgcgacgtgggggcagatggacgcctgctccacgggtacaaccagctgggctatgatggagaagattacctcaccctgaacgaggacttgagctcctggacagcgaccttaggtcagatctctcagggcaagttaggagaccacttgaaggacagctgcgtggagacgctgcacaaacacctggaaaaagggaaggaagtgctgctgcgctcaggtgcccggggagccacaccccgcccaagtttccctctggctgcttgctgggagtttagagagctgggggtgcctgcatgggcaggatgagagcacttggggatagctcacaggttgagtgctgcccagcaggacaggttctgggttagagcctttccttttccggagggggaggagagggaggcaggtgaaccagagggccttagctcactcctccccagagtccaaggaggcaggagacaacttggttccaaatctttgaccaagaatgaatccctcagaggacagcccttctcttactgccagtaaagaaattcattttccctaacagtagaccaaccttttagtaactgatcaacagttcctttacttgggcaatggacctggacccataggaggttttttctctcaggcctcctccagtgtatctggagtctggatcctgcttttctgagtctcctggccctccctcagctcaggaccagaaaactcctcccatccatcagtctgcagagccctgaagccccctaccctagagcaccccaaagaacagattacccccagtgcctgctctacttggggtctattaatatatggacacctaatcccaccccagttctgctgtccattcctagaatggtcacatgaacactgctgagtccccaggaaaaagccagatgcctgatcttcccaactctccccctcagaccccccaaaggcacatgtgacccatcatcctggatataaaggtgatgtcaccctgaggtgctgggctctgggcttctatcctgctgagatttccctgacctggcagttggatggggaggacctgatccaggaaatggagtttgtggaaaccagaccagcaggggatggaaacttccagaagtgggcagccgtggtggtgccttctggggaggaacagaaatacacatgccatgtgcaccatgaggggctgcctgagcccctcaccctgagatggggtaaggaggaagtgggtgcagagctggaggcagctgtagtcagagcttagaactgggtggtcctcatctccccctcctttcccagagcctccttggaacaagaaatattggtttctcctccttatcctcatcctcatcacagtttgggtgctttgcatatgtaagaagaaggatgcaggtaggatgctgagtttacttgtcccactgagggcttcaagccataggtggcagtgtcctgcctaggtaatgggatgtaccatccacagctctgtgtctccttcatttgtgacctttttgtttaggcttcaaaagtagagaagggaagatttgcttgggggatggttctggtgactgagatctcatgtccagctgtcgcaagcagaggtctcactaaggacaaacctccaggaagctattacaatgtctcagttctcgaaatttcccttgggctagggactaaggttcccaaccctttggaggtcacattaagatatccttcgtatcagacttgcattatgattcatagaagcaaaatgacagttacgaagcagcaacacaataattttatggccggtggctcaccacagcatgaggagctgtgtttaagggtggcagcatgaggaagtgcctgctcccatgatacccatacatggatttctttcctcaggtgggagaggaaggagccacactcaggaagaaggtaagtgtggtgagaggtggtgtctgagactcttggagtccatgagagctcacccagcccatagtcccccctcaacctccagtcttctgaagcctgaccaggtcctgctctgttctttcctaggcaggaacagtggccaggactctggtgagacggccgtggatgatgaggtgatatgtggggaaagacagacgacacaggttggggctggagagagtctttgcactcagacatttagagtgaggaggaagctattcagaatgtcaccactataccgtgacatctgccttaatcttgtaggagatggtcattctctctggggagcctgagccctctcggaatcgtccagaccactccttcagactgagtgatctgtcattctgaaaaggtatctgattgtcctccctctactctgtggcactcagaagtctctgcttagtcttctcgctcagggacacccccacttccccgccctctcccacacccaactccatgtggaagtgcctggaacagctactacagaatggaatcttttgttttgttttggtgacagggtttctccatgattcagtcctggctgccctgtaactcactctgtagcccaggatggcctcgaacccacagagatccacctgcctctgcctgccaagtgctgggattaaaggcatgtgccaccaccatacagctcagaatggaatcttctgttttgtatatcaccagacatcttcacagtcaacttgactggacttagaatcacctagaagccgcccctctggatgtgtctgtgagggtgtttctagccaggtttaacccaggaggaagaaacaggttgactgtaaggtagcttcactcacagctggagtctgaagagaaagccagcaggacactggagtcccccttcctgtgtttcctaacaggacatgagcaggccatctcctgccaccatgaacagagacaggtcccacttttctgtcttgaacatctgacacctgtctcttccctaagtggcttctcatcaggtattttttgtcgcagggcacagggttagacacaaagctccttccccacatccaaggcttcctgagcatcactccctaatcttttagagactttcactcaggccaaactgggatctatggctttggtgcggaaaaggattatggactactagagctggtgtttaataaacatgtttctatttgtttttaattttaa

SEQ ID NO: 2 - DNA, 247881 bp, Cricetulus griseus
  misc_difference 27878..28464: note = n is a, c, g, or t
  misc_difference 32310..32559: note = n is a, c, g, or t
  misc_difference 44725..44763: note = n is a, c, g, or t
  misc_difference 52911..52984: note = n is a, c, g, or t
  misc_difference 54132..54158: note = n is a, c, g, or t
  misc_difference 55328..55418: note = n is a, c, g, or t
  misc_difference 61688..61819: note = n is a, c, g, or t
  misc_difference 65710..65816: note = n is a, c, g, or t
  misc_difference 76404..76428: note = n is a, c, g, or t
  misc_difference 81914..82028: note = n is a, c, g, or t
  misc_difference 99280..99312: note = n is a, c, g, or t
  misc_difference 103366..104009: note = n is a, c, g, or t
  misc_difference 104456..105181: note = n is a, c, g, or t
  misc_difference 105312..105349: note = n is a, c, g, or t
  misc_difference 105697..105860: note = n is a, c, g, or t
  misc_difference 106069..106131: note = n is a, c, g, or t
  misc_difference 118030..118158: note = n is a, c, g, or t
  misc_difference 149844..150135: note = n is a, c, g, or t
  misc_difference 180498..180511: note = n is a, c, g, or t
  misc_difference 183367..183466: note = n is a, c, g, or t
  misc_difference 192091..192520: note = n is a, c, g, or t
  misc_difference 196828..197583: note = n is a, c, g, or t
  misc_difference 197889..197995: note = n is a, c, g, or t
  misc_difference 198807..198816: note = n is a, c, g, or t
  misc_difference 200258..200402: note = n is a, c, g, or t
  misc_difference 203405..203415: note = n is a, c, g, or t
  misc_difference 210100..210542: note = n is a, c, g, or t
  source 1..247881: mol_type = other DNA
atgaatctgagagtcagaagagacatgaaggctgcagacaaaattctgataagcatacaggtaagagttgaaaccatgagtatgtgtgataatatccagggaatgtgtaaaaaataaagaaaactacaaaagccaaactctgatgagtttcatgatttaagaaagtaaaagcaatccattgtcacaatgtgtgataagtaccacttaaaggcaaaaataagatactctagtgactcaaaataagattggctagcttgtgatgagatactgcatgaagggctttacttcaatttaagggatgtataggtgtgtgtggatggaattggggcaagaaaacaatcatctattttacaaggaaaacaaaggacttcaaatgaaaaaattctcaagcatccttcagctgtatatcctagtatatgggcagtgttcctcaaagtgtggtcaacagttcactggcatgagagactcacataaggcatttatcaaaacaaatactatattaaattttgtgcaaagtaattgaaggtgtgaccttggaagaagcagctagagtgaagtgggcctaaaggctttggagttgatgagttcaaaaaattggaatcttaaatttgccagcattagcagggaggaagtgggaaatgaagtgtttgtagattgggatgttttgcaagaatataattgacttcataggttttgctttacttaagctgaaaaatgagccaaacatgactaagacgagtagctatcctctaagctggtcccaagttacccaggacatacacaaggtcaactccgtgaaagaaaaatgaacacttgatttggttgactgggtgtggtcattaaaacactaatgacaaaaacacagccatgaattaccctgggtttgctttcacttttttagcttgttatctgacactttatcagcctttcctaatgaactgatactacctaaaattaccaagtgtttgctttacaattcattaataatattggagataaaaatttccatgtttccttaatttttatcctaaaaaagatttgtttttaatttgcctgtttgttttctaaagatagggagaaaggtggcatgaagttagatgaacagagaagtagagaggatttgagagaagatgggagagggaaaacagagatcagaatatattgtatgaaaaaataattttgataaaaaggaattttttttaaaaaagaaagctactgttaagtaagaaaaagtgtttaaagaaagatacatcagggttggaaaaatggctcagcagttgagagcactggctctccgggggaccagggttcatttcccagcacccacatggcagctcataactgcctatgattccagtttcagggaatccaacaacttcacacaggcatacatgcaggcaaaacatgaatgcacatgaaatcaaaagggagggttggtggagggtgagagaggagagagggagagggagctgggattgacatgtgaagcaagcttgttgttaattttaaaaaataataataaagaaaccattaagaaaaaagaaagatacatcatgataagtttagaaatgccttgcttgaagggacatcatgaactaggtaaaccatgaattaatcttttgtctttatggaatcacagggctttgctttcacattaaattgatggcatacatacatacatacatacatacatacatacatacatacatacatacatacatacatacataatacatacatatatcctactgtgatgagaatccttcttctgagtaatctgttaatgcgctttgttactgtgtcaaagaatctatctatatgaccttccagagttgggcacatcaggttagaatcatggcatcaaactttcttaccttttggtttcagaataagtccaatgttcttagtcatcccctgtaacttctctgggaaaaaagatatataaacaattgtcctcttcaaagctagtattatacctggccctttcctgagatacgattaatttagttcttacttcaaaacagaacataaagaatgataaaaatttcattaaagaactagctcttctcttcacagatatattaattttgtttataattcaatgttttctaacataaattttctggaccacatattgtgttattaagttagtaatgaatgcgaagcagatggcatagcctccattaaccaggaattagaaggctttctaggacatgtaagaggtataaaagggaaaataagctgtcacttatgttgtaatacttttggttggtcgctatatgagatgagaaattcttgaagaaaaagaaagaaagagcagtaagaaggaagaaaggaattgaaataagaaaaaccaagcaaaaagaaaagaaaaaagggaggaagagcctcgaaacttaaaggaaaacctttaagttttgcacagttctacagggaaagacactaaagcaatgaaacactgggccactagagagttacatttttctggaacgtatactaatattcctataggaccatgacatttattttgtattagaaaatattacatttactaaaactaccttgcagtgattttattagtttagcctgctattgtattaactgctagcgctccccagaatgttccatgaagtgggtgacttaaaaaatagataattattttctaacaattctgaggggtaaaagttcaatgtcaagcagtatggcttccttctaaagcctatgtccctaacttccagataactgtctccttgtgacttcacaaagtctttctctgtatgtcctaattttctcttcttataaaaacacaagtcataattgatttggaccccttattttaacttaattacctcttaaaaggccccatctttaaatactgtcatatttttaaataggatttcaacatgaattttggcagaaactgtttaacacataacacttattacttcagattttcacatacattaacacaaaattccatatatgcatacataatgcaattttaaatgtatttatttacttgtgtgtatctacttatcctgtgtgcacatacatacaccatggtgtgtgtatggaggtgataggacagctattccaagtcaattctcaccttctacctattgaagatgggtctcttatttctgtcacactacgtactccaagccatctggcccattcccttccaagcaattttcctggctcgtctgcccattttaccaatttccctgcctcctctacccatttcaccttacgagtgttcggcttgccaatgtacacaaccacatctgaattgctgtgagtctggggattaagtagtcaggctattacagctattgctcataatatcaatttgtgagttaccattttataggttttatccagctgagcctggtggcatatgattttaaccacagcatttaggaggcagaggcagggagatatctgtgagtacagtgccagacagggcttcatagacactctgtctcaaaataagtaaacaaacaaataaataaacaaacctgccctttaaaataaaggtctattccacgggaggaatccatgagcatgttctattgcccatgctttcctaggtacttaagtaggtgttatggctaaaatgaaaaaaaaaaaaaaattttgtttcccttgaagacttttgagatcagaaagaatagaaatagcataaataagcaagcacaataaaatgtattaaatactgctaaaggaagaaacgaagttttgaaagccaaatttagttagacccatagcaagccagcaaaggtgaagcaatatattagttacagaatattgctgtgctggctcttttttttttatcaactttatgcagagtcgcctgggaagagggaacctcaactgaggaatggcttccatcagattgccctttgggcgagcctgtggaggcattttcttgattaattattgatgtgggagggcccatcccactggtactttgccacccctggcaagaggtactgagttatttaagaaacactgaacaaagccacagggggcaagccagttaagcaacacccatggcctctgcaccagctcctaccaccaggttcctgccctgtttgagttcctgctctgactttctccaggaatgggctgtaaagtgaaagctcaaataaacccttttctccccaagttgcttttggtgaatactttatcacaacaacaggaaagtaaactacaactaattatcgacctaattaacaccactacataaagtattaggtcattattttttgtaatatgtaatttattcatccatttagcttttattctgaaatttgaaaaaccacttactatagatattgaataaaatatattataaaatactatgttccaatttgtcaaaaagtctatagaaatatattagttttagcatgaaagatggtcatgatttgattttgcataatatgttacccaaattaaaaataatcctgatagtatactagaagttaagctatcattatacacagggatatgtataggtgtgggggtggagggtaaaagagagagtgtgtgtactcagaattctaaggactgctcaaaaaattatgcatgagttgtttgccaagaactataacatatcccctaaagatatgcaacaaccaaacaaccatagaaaaaaatgtggtgagttaacacaattcattatcaagtcctatatcatttagatagcattatttatcttaaaagtttatcttgatattatgatgcacttcaagaagcatttagttcagcttagttatttttataaagtcacatttttcctgacccctgaggataaacatatcataaagactcacatacaccagtgattcttaactttaagtttcttttctctttggtctttcaaagacattcatagaagtggaaagaggagttttttgatcactgtaaacaccatcatgaaatcaaggaaagaatcctgtttgttgttgtaatagactcaaaatagtagtctttgtataacaaattaagagaaatatgacataaggaaatatgacttaaggacagaattgttaagagctaaagatcttagttcataaactatagacagacagacagacagacagacagacagacagacagacagaattagaatggcctacaggctgtggtgaatgttgggtttttagttaatttctgatgcagtcaatttgacagacaataaaagccatcacatctatgtaatacaaacattacacaagacttctgaaatgaccatttataatatgcaacaagctctgtaagaaaaactactttgttttatagctacttaatatattcttttaaaactgtgatataattaatataccataactctttcaaaaatatgtagctcagaagccagtaagcaggctcagcaggtataggtgcttgctgctaagcctgaaaacctgagttttattcccagaacccatgtgatggaaattgtcttaggatctccacacattaccctacccagcaacacaaataaacaaacaaataactaggtaaatgtgtatatcaataactgtatagtttgactatattcacaatgttataaaactatctccactctaaactgccagtacatattacattaacaataaataaataaataaataaataaagcatttcttttacctactcagaatacttgaaagattgatgagtctttgcttttactaatttgccacttctggacatttcttataaatggaatcataatttgtcactctgttattggttccctatacttagtgcaatgtgttcaaatgagtcaatttttttgttttgttttttgttttttgagacagggtttctctgtggctttgcaggctgtcctagaactagctcttgtagagcaggctggtctggaactcaatgatattctagttaattgtcatagtgcattttgcttatccatatataaattggtgaacacttggattgttttgtctgttggctactatgaacaatgttttagttttcaatggtgtttttctgaaatggcaaaagtatttcactttggtaaagttgagttcatctatttatttttcaacattgtcctttgatgcttatatagaaaaaccaatatcgagaacattacatgtaagccaggcttggtagcacacacctttaattctagcactctgcaggcagaggcaggctgatctctttgaatttgagcccagcctggtctacatatggaattctggtacagtcaagactacatagagaaaccctctcccacacatacaaacaagaacattaaatctatattttatcccaggtgtgctatacattagattttcatttggtcttttgatttacttagagttactttttgtatattgtataaaatatgtatgggcccttctatatttgtcttggtcaataaaactttatactaaatgttgaaatcaagaagttaacaaaagtctaacccttttctagcaattactattcagcactatgaattgtcattccagtctatactactcagcatcagaaaaagaaatgaaaagcaaccaggttgcaaaggatgaagtaaaattgtcttttttttcttgcagaagacatgattttgtatatagataatctaaaagcatctacaaagaagctactagacttcaaaaggggggttagccaagctgcaagaatcaagaatcaattcatttcaataactggaatgtatttctatagtctaggaatgaacaattgaatactacctttttaacttttattgattctttgcagtttttacatcatgcattcccatccctcttatccactgatatctaccctctacccttgcaacctcccatcccctaaaacaaccaaaacccaaacaaaacaaaagaaaggagaagaatcttgtggaagatgtagtatggcctattgagtcacacagtttaccctttagtccattcatctttacttgcaagtgttcattgctaagagtcattggtctggctcaaggcctctggcttctactatgccactgataatggggatcctcttggatatcctgatctacagaatatgacatttaaaatgttttaataacataggtatttttaatgacaatgagaaatgttttctcctgacggcaccaatgtacttcagagaagatgataggaattgaagaaacttcacatggattcaccaagataggataggatagaaggtgtagttccatgtaggttccccagctgtcagtccatagtccttgaactcccattagcttgggtcagctgtctctgtggttttcccccctcatgctcttgacacccccccattcatattatccctcccccctctcttcaactgtacttcaggagctcagcccagtccttggctgtgtgtcactgcctctgcttctttcatagactctttaagtcatttattcacttcctccttaaaggcttctataatatgcataagggttactttaaggactttgtcttattcttctgctatgttgcaatactcagactctactgtggtagagtcgctgggctccagtggagacatattgtcttaactgttattgatttgtgtttgtgctggtgtcttggcatctgggtttggaagattgaaattcccgaggtgatgatatgtggtcttatctttgttgggtgttttccacgctggtttctgctttcctctctgcttcctaggaaggtgttgagactgtgtgttgcctgataggagattcttttgggatcccgctaggtacagtggggtttcctggtaaaatgtgtttctaggtattgggagctgattcttaggaatggggattgtctggggtagtggcaagggggttcacaggaggaaggaaaacagggtgttccaccaggatctgcttagtcccctgggaatgtgggaaaagagtgagaagaggccacaacaggtagtgtgctacagaattgttgatgaaactaagggataggatatggagaaagtaagagaatggtgaaggtctgcagttagtcttttccccctacctggactggccttcaggtttccaaggaatgcttattgggattaggcactgggataaagcaatgagctgggaaaagaaaggcttgaggggaagatctgtgtgttccactagagatgggggcagggaggtaggtgaggatacagcagatggcctgctacagagcaaaaggaaaattggatttggagcagaggatctgtagttattttccctcccttgatctgaatggcctgcaggttccaggtgaatgcccattggaattgggggctgggataaagtaatgagtgggggtcagaaatttggaagtgaagatctgtgtgatccattgacgatggcaggcctgggacattgctgtatgggttctgctgcaaggctggggataagactggggtattggatttgagggtgtggaggaagaagaaagcttcggcagttagcttgtcttcgttcctggcctgtatgccaaatttaaaagtaaataaaaagaaaaattgtaaagctttaaaaattaaaaacaaaacatttgagggaatgaaacgtaacagcattcataatgtgcttgttatatgccaagtactttagcaagagctttgcaaaggacagtagttgcatcattccatagcctcattttatttgtgggggaaactaaggcactgtagagatcagttacttgggtaatgccacaaggctgcaataaatcataacatatacttcatctcacaataattattgaaacatattagtcggtttttgtatcttagttaatattttatatacactacattatgtgatcccgatgactacaataaagtaggtaccacttcacagaggaagaaacatgattaagcaatgtgccccaaatcaggcatcagacagaagaatgtatttgaatcaagaatctttatctgttagttgtgtcctggtgggaagatgactacaaactattttcagtttggaagttggatctttggtacatgcagtcagattggatcttttcacaatcaacaaaatgctatgtgcttgatgtccaatgcaggcttttgctatctgtattactattggtaacccaccagagatgaccactcagacatagtttataggcagttgaaagtctatattccaactggctgggaccacacccagctactccaggatctaggtgtgaccccaagtgtttagagcacatgagttttgaaggcaaattccatgtattggcatctagctcagcagctgcttgtggccgttgtggaagcaagtagtttaacagaagcttagataagcatgtagctggagagattccacacaaacaggcagttgaacagaaggtgtttaagttagctaggacatcctgacctttgttttgtagagttggattattttcattgggattattcatcaaagagacccaattctagttaaacctgaaatggtctcagcaagaatacaagatggagaaacctttccattgtcttgccctgtcacattatctttattatctctctctgccttgtcccatctgtccaaatgaatatgtagacaccaatgacacaccaaagacttcctcctagctcatcctccatagcatcaagcctggttggacaggtattatatagttttccaggtccttggctgcaaatatgtgggtctctaccagtcccaggtagcatcctctacaagatttcctctctcttcctccctctctctctctctcccttcctccctccctctctccctccctctctctctctgtctctctgtctgtctctgtctctctctgtctttgtctgtctgtctgtctgtctgtctctctctctctctctctctctcttcatttctttctttcactagaaggcctcttagtgaacatatgtgaagcatgacaaaggcttgtttacaaaccgtttgagtcagctttaaagctacctgcttcttatagattcatttctgttttctgttggcatgagaaattctgtgccgttgagggctacagatgagatgaaagttttataggcaatactccccatagatgcagagattacactgaatgccttgttctttttaacacccattcacatgatgctgagacaactgtaatgtgttcatctgctgcccttgaccctgctgcttttgcctctccctcatctgccagccgtgtgcattgttccactcctgagagtgcctgctggtttgcacttgattcatgtcttatatcatcaactctattctatgatcctgacttcactaaacatttggcttccctttccatgcaatgtattgctgcctgttaaatgtgcagtttggtacttttgaaatatctgcatgtaaaaactgttcttgaggaggcagtcagtagtagttttcaccttcttacttcaatcacatctccaccactagtgatttattcttctgtctgttcttttctctagccctctggcttatttgtttctgccttaaggagttttcaaacatcagtgcatcaaaatcatttggaagacttattgaaatccaaatttttttatctcactaaagttttcaatgtaacagtcttggttggtgcctatcttggttggtagaatgtttcctttgtaatcatgaagtcctggtttgatatccaattccacatagactcagacatggtcacacacacacacacacacacacacacctataatcccagtaatttcgaggaagagtctggaagatcagtttaaggtcatcctttgctacactgagagtttgaagccagtctgggggacatgagaccatgtctcaaaaatatttatttctgtggttgtagagatggctcggcagttaaaagaactgactttccattgtagagggcctgggttagatttctcatacccacatggcagttcacaatcatctgtaacattagtttcagaggatccaatgccctcttctaacagccacaggtaccaatcctgcacatggtacacagatacatatgcagacaaaacacccatatgtctagcatgaaataaaactttaaaaagagaattatttataacaaattttgatgtaatgctaatactttggttgacacggtatagtttgagaaccacagttctagaccaacattgttcatattaatcacctctttatttctgtggcttgttatgtagtccctttctgttggaatgttccaatgtgcaaagatggctagcatagctaagattcctcatcttttagggccacaggaaaaaagctctgaatgttccatcgccctccaagtcagtgtcactgaaaagttacaaactgaatgtactgtctagaatcaaaataaaggtctcgaacttatttccattgttcagcccactgtctaaatgtaagctgttcagctttctagaagtggccaggagaaaaaaaaactcagaaatataaaaagtaatctatttgaataagcaaaatcatttggctctcatactcatattccttgccgttattataatgaaaatatttctatttgtacatattggcagaagtaaaggattattgttgcagaatattcctttacactgtgtgaagatgtgtcacggagagtggtttaataaagggctggatggccaatagctagcgaggaagaggttaggcaggacttctggggacagaaaagactttgagaggaagaaaggcacagtggccagccagatgccaagggagtagaatgggcagtacagagtaaaaaggtaactaaaccatgtaaaagaatgcagatttcaaaatatgggttaatttaagtcataagcactacttaggagcaagcctgagctatggtggagctttcgtaattaataataagtctccaaatcatcatttgtgagctggctggcaggacagagaaagactcgttacagattattggtatttggatatgaatgtcttccaaaggcttctgttgtgcaggcttgcttagttcctgttatgtaacgataactctttccgcctgctgcctgagcctggctgccacaatcgggcccccaaacagcatacagagtcttatgttagttacaatgctgctagccaatgactaggatttctcataagctagctcagtcttaattatcaaccataactactaatctatatattttatagagacttatcttatctaggacgcaggccttatgtgtcctctcttcccagggctcacatggagacttccgtcattactacatttctcagaatcctccatgactcctagctccacctatcttgcttccctattggccaacagtgctttatttatcaaccaataagacaaacatacacagaaggacttcccccatcaatgttcagagcttggcctttgaagaagggaacctttaacataatcagtggattaattcatagatggattcataatgggaaggcttattaaactgttatagagactaagagatggagatgggttagagaaagtagctcactggagttgtactttgaaggctttatctgctccctgagccagtcctgtctctttctctgatttctgatgaccctttgctgtgtgggatttcttcctagtgttatgctttagcacctcaagcccacagcactggaaccagctagctgtgaagtgaaacttgtgaaactatggtccggaataatctttcccttctgaagttgttttgttcgggtattttacataccaatgagtaggtaacacaattatctcggtgtgtatctattcatgcactttgtgcattagttttaatggataaacacatatctaagaaggcttgaagctaatgtaatttataaagtacaaacctccagcactaaaagcattcttccagcacacaaatggaattttgggcccctgtgtattttctggcacattctaagtacaagctggaatttgattccctaaatgaatgttgaactacaatgtaaagctccctttcctatgtctgcctgttcataggccaacatcagaaaattatattacagaaaatggctaccaggtgtggccaaaaggggagaataataacatgtgctgaataaaggctagaagggagcaaagaaaggaaaggggaagactaatgatgaataccaagtatcctttgactgaagagattagactttcatatttggctgctgagctgcctcttaaacagtttccgaactgaagttctgagcaattttacctttggtttaattggatgcagtcttccaatgatacattattttgaaaacaccacaatctgctcactggcttctgtctttaatgttacccaaggcttcttccttttggacttttctgtgactactcttcttttaagttaatgaatagcttctgtgctatttcactgttttggataccatctcacacgtctgaatgtgggtgtttttgttgtctgtttacttgctttttagataaggccttactatgtcttccaggctgggctgtctcccaggctgggcttgaactctgcctgcacgcatccttgcacctctatcttaggaatgtctagggctgcttctgctaaccattacacccagtttacctgcacatgtgtgtgtttttccctcagcactcagccattcaatatcaaaaatatttctctttttagatttccaatctttgttattgtatcatggtaccaacatcttttccctcatccctggccatcattcagtattaaaatctcagactctatgatgagtaataaataatgttatgcattttccttagatgatttatttttcctatttacacttaaattcagctttttggagacttatttcttggttctcattaatctttacctcagtggttctcaatctgtgggtcgagaccccactggggtcaagagaccctttcacaggagtcacctaagaacatcagagaacacagatatttactttatgattcataaaagtagcaaaattacagttttgaagtagaaaaaacaaatactttgtggttgggggtcaccacagcatgtagaactatactaaagggtcccagcatcaggaaggttgagaaccactgctctccatgctattctttggtaactgtttttactcccatagcttcaaataatatttcttttccttttcttccccttgagacaggttctcactgtgttgccaggctggcattaagcctacagagaccagtctgcctctgttttctgagtagtaggattaaaagcatatgccactgtgcctggctcaagctaatcattttaatgactataaatcttcacccttttcttcaaatatcatctctttctcagaaattttttagaagcactgtacttaatttctaataaaatcttcatgaacatacctggcaggcatctgaaatgctgcttcttttctctataaaacttgacattctgttatttttacaaatgtatttctcctattagattcccagtctcatatttctactcttcctactacaggatattgaaatctcagaatctatccctttcgtcgtttatatcaggtctccaaattctgagaaacatctatattatttgttttttcccctttattttcttttctactgtcccagagcttggggtatttatgcctaggatgaaactacctaactgcctctggtatctaggaccaaccaatatagcagtttatctattaaccaataagattaaacgctacatgcatgtatgctgtttacattgattctctttccttaagatatattttctctttgtctagactccgttaggcaaatccatgtgaccacaaatgaagtgtaattgaaactttcattatttggacttttactatattttccccttagttattagtggtagattttatcttagttgatccttccagctccttatagccttcacagtcctggatatctgtcctgggtaatgtttctagagaacagcactcaagtttaacatgcacatttcccccactcaaaagactgtgacttttgaaagtggcatcctaacttaccttctcatctcagtttctgatttttttttttttgagataaggtttcatgtagcccaggctggcttcaaactccctgtgtagctgaggacagccttgaatttctgatcctcctgattctgcttcccacaagcagggattctagccatgtgcctccacatttatttttatctagttctgggcattgaacccagagccttgtgcatgttaggcaagcactctatggattggactgcatccccaaacctgcttcctcatttttcttaaacagaggtctctattgagtccatgaatatagaacaaattcaaaattcaggatcacatttcaagtctctctgacttggttccactgctcttccagctttatctctcactgcagcatctgtagaatactaacacagtccatattttttcttcatgctgctggtaatgctaattcctttgtcacaaacagtttcctctcattttaacatttggggtcatacacgtacctaggaggctagattctctctctacaaaagttgccagattcttagttcttttcttattgtatgacactataacattcttttataagtaattatgaatttgtcggttgccctgactagatagtaattccattgagaccattcccttatattcagcacattgccctggatatggatcattctcaacattcatttatatactattactgaattaaaatcacatatgtaaattctaatattctagataaaatcttattataattctacatggtagtaagcaagaaaaacaagtttgaaacaggaaaagcaatcgtctcataatttatatatcaaaccataggcccacatgcaggccggcaatgcaacaggaaaacatttttctgaggattttggaatcaagctcagcccagtaagcctttgaatttggccactaccgaagccaagcctcagaggcctttttattgtgtgaagcaacaacatgatgagggattaaaggatgaaaatgttgatgcaaatcagggttggttcatagagtttagaggcagggctgcctttaaaaaataagtgctgatggaatggcttgttagcctttctgttctcaaagcagcagaaggccaatgttacagatatatttgaaacaagaaagcatcaaatcaaatacagaggagcagtgtgtaaatatcctggtgtttgtttctaaggaaattatccatgagccaggagcaggggttcatgggattcatactgaaatacatttgaagctgaagtaggatgattgcaggtttgaagcaaatccaggctaaatagcaaaaccctgtctcaaaaaaaataaaaaacaaaacaaagaaacaaacaaagcaacatatcaatgctgacttggagacagtgcctacacaactcattaaagacagagaagctgagctagaaccctagaaccctcaccctatggactaatattcatggtactggaagggactctggtggatgatacctaatgagaaagataaacatcaatccagttacaaatccttccatctaatatgatgtcttgccggaaagatatgaaggtacaatagcgatgcaatgcttgtgggaataacgaataaagatctgatttgatttaaggttcactccatgaaagggaatccatatccaacactgcttgagtggctaagaacctgagactagataggccatggaacttggggaaaccaaatactactgttatgataaaagaatgtagcaataaaatgactcctaacaacatttttctatactcatagatagatcagtgtcttgcttttccatcatcagagaagcttccttcagcacaagatgagaacaaatatagagacttacagctaaaaaatgtgcagagagtgagagagcttggaacactcagccttaaatgggatgtctccatcaaatccctccactcagggatcatggaaccatgaaaaggcacaaagagtgtaagagccagaagggatggaggagaccaaggaaacaaggcctcctaaacatagcaggatgatgcacagaagaactcacagaaactggggcagcatacacacgacctgtgcagcagatgaagtcctggagctgagaggagatgtgggcacatttcccacccccatctctaaacagaaactatttctaatcgataaccacttgaaaatgaaaaattagttttcttcaattgaatttccctggtaaaacaagccactcttaagggaaggccccatgccctgcagtggatggtcaaagctaaatgaacgtgactcagtggcatctttgatggttcctagtctcataatatcttgtcggggcttttttcttcctttctctccctgtttttaagaaaatttaaattttatttttatttttagctgtggttttcctgagtgcgcaaaataattgggtctttatatctatatgtttttttttgttttttgttttttgttttttttgcatgccttttcttggactctcttccttatttgtattgctctattctaattagtttgtttttgctttgtcttatattttattattgtcccttagatgactgtttgttttctaatgatatacagaaaaggagtggatgtggattggagagcaagtggggaggagctgagcagagtagagggaaaggaaaccaaaatcagaatatattgtatgaaaaaaatctattttcaatacaagaaaaacaaaataaaatctaataaagccacaaatcacatgctgaattggagatggaggtgagttgtagagagagcacttgcctgtcatgtacaaaaccctaggttagatcccggcacaagaagaaaagggacagaagaaaactcacatgtaaatctttacaaagagggccataagacgccttatgggttaaaagggtaaaaaacatttcctaggcaaccctgaagacttgagttccaaccctgaatcacacacacacacacacacacacacacacacacacacactcacaataaataaaatttgaagttttatagtgttggtcttctgagtgaatttgatgctattgtagaagcacatgttaacttttaatatcttgaattagtagacttaaataaacaagagctaagtattcttagttatttattaggtaaaatataacataagataatataaatcagtctccagtttgtcttgcttactccatgtgcataaagtcctgagaggtgtaccgtatataatgtgcttcatacagtctttgtggtcatttctataaaatagcaaagatcaggtcttagataataatttttctgtcatatcattatttaggaaaactgaatcgcaaatctgcatttgccaggaagggaagaagccttttatttttgtcaggatgccagctcttgagctgtaaagaggcatatttgccactatgtgaacagcaagggaatggcttaaacaactggcttctctcaacatgtaagaaatgcatagataacaatgagtaaataagaatgagtgtgaggccaggtgttggtggcgcacgcctttaatcccagcactcgggaggcagaggcaggctccagagtgagtgccaggataggctccaaagctacacagagaaaccctgtctccggaaaaaaaaaaaaaaggatgttaaaataatgatgtgacagagtatatgaaacacaaataacctgttttaggctggcctagctattgcctgccagatataaataatattcttattgtttacatgtgttgtttagtttttatgtacttagtaattattttggacaggtcagaaaataaaccaccaaacacaagagacaatagtttttaattgcacaattgtagtcctgcttttacagtaagtatgctcatcttcaagagactgtttaccaatttcttaagggagtctaaattgagctgatcatcttggcgtgcatatggaatgtcaccacactggaggctccgtcaagataacaacatcaagaccactgctccacagtgggtctcggtctcaaaagaaaacaagctaaaagcaactgaaaacaagtcagcagttccaaacactaacaacaaaaccctacacttcccaaagtaaatatcctcatgaatactgtggtgtttctctcagccacatagattagcaaggaaacagaaagcttgccccactctgttcatccctacatctgtgctttaataacgtatagattggagggataccgttcatgatctgttaagagactcctggaaaacatcttggagctttggtgaatgtagagcagggaggtctgttctttgttaaaaagcattatatgtatatatcctgttcattcctgttaaaagttaaaggcttcgttttcaatatattgtttaaaaccacagggggcaagaatttgggaattcaccatccacttctcaccccctgcccccaagaaaaaattggcactgttgtcttctgggtaactttgtgtggatcagtcgtttccattatttgctttcattcccaaatctattaacatttatctccatgtaaatggccttagtagtgattagtgtttgtagttttgtcttgttgataagcttttcctccattgggaaccatcacccctctagtcagagaggatttcaggagtttggtggcttagctagtggtcctacagctgtaggttcaattcttatctcagctatccggaaatgtgacagggttttggagataagttttattttcctgtctgccttcatttcatagactttgtctgctttactagttcctttagaatcagtgattttttttcctacgtggtgcattgccagacccctcaacagactggtaatttgtttcctaatcccaatccctgtgactggactcctgttacatactacctgatcacatttctgtctgtctgttgccaaagttttgagactttaattttctggcctcatgctgagacatccactggtatacttccagagtctggctgcctgcctggctgcttgttacctgcagttacattctgtaatggtgtagcagtttatccaaactcttcctggtgatgccaggaccttctaagtcctcctgtcctgccataattactttctttagcttctgtaccttggtcagactctgcctgccaacatctggcacttgttgagatgatatctcccaacttaggtgtagtctttatttccttggggtagcattttgctaattgttatttatctgatattcctttcctttatttcctgtatagaatgtgtggtgaagtagggtttgttcctcctaaaagagtcttgggggcatttctgtatttcctctggggctgctcgagttccaggccttaggacttacttcatctagctttaggcagagaggagcagtgctgctacacctcatttcctcagggtgtggcagagaagctaagtggagtactagccaaaggagccagctggactttgctctgctgtgtattcgggatctgtgaagagttttatttatttatctatttatttccaaaagaaatccctactaaaggaaacatggttctgaaaaatcaggtttcaaagttgtctcaagtacctttgccaaaactcctcctaaaacactttatgttttataacttccttgctaaagatccttatcagcgaataccactgtgtcctacactccaatttgtttgcatactgggaaaaggttatgggctgactgcatttcccagtattattccgcacccatgttcttatgattccagcataggttcatcagcctttgaacatcgtccatcaagatttccaggctgatccacatgacgtattttccttgcttcctttctttgttttgccttttccaatctgatttctgattccaagttcagcagcgcaagcagctctcttagaaaacttcatctctttgaggcctaatttgtctcatcctttctctctagtacgttgttgtcttttgagtcagttcttccagttaggaagataattgtcctgccttcatgtctgtcttagtgtttctaatgctgtgatgaaacatcatgaccataaacaacttggagaggacaggctttatttcatcttatgattccaggtggatagagaagagatcatgcaatcagtgtaggaacctggaggcaggagttgatgaagagaccatagaagagagctgcttacttgctaggtccccacaggttgcttggcctgctttcttttatgttttagaattaaataatgactttttccagcttgttttgtgtgtgcactgcctccctcctctcctcccaccccctccctccaacctccccgctgccctcccccccccactccccctcatttgcttcacccagcaactgatggaaacagatgcagagacccacagccaaacattaggtcaagctctgggaatcctgcagaagaaagggaggaaggattgtaggacccagaggggccaaggacctcagaagaaaaaccagagaatcaactaacctggactcaagaattttaaagagatggaactgacaaccagggaacctgcctgagactgacctaggatctctgcatacatgttacagttgtgtagcttggtcttcttgtgggactctgaacagtgggggcagggcaggggctgtctcagactctgttacttgcttttgggccccttcctcatccttcctgctttcttatagaacccggtggtggcagctgggcccttccataacaaacactaattaagaaaatgcaccacaggtcaatctagtgggaacattttctcaattgaggtttccactttcaaaatgattctctagcttgtgtcaagattatatataactacccagcaaaaatgcttgttttctcctgtatccccttttctcattcttcgttcatttatttatttattcattcattcattcttttttgaacattagctcaaaccctagactagtcttaaacttgctgtttttgcagtaactgactttgtactcttttttctttcagtttctttttaaaatttttttgatttcattttacattccaaccacagctcttccacccacccctcctcctagccctctagcctactcccatccccctcacttccccccagcccactcccagtccactccttctcacagttaattattcccatgaggagtcaacatagtccagcacaatagcttggggcagggcccagcccctctcccatgctttaaggctgagcatggcatcccaccatggggagtgggctccaacaagctagctcatgtaccaggtttgtattgtggttgactgccagggggccctctggtagtccaagcttcacaagtgtctcctacatacagagggcctagtttggttccctggagtctccacagttgtgggtctagagttcaggagtttgcattagcttggttcagctgtgtctgtagatttctccatcatgatcttaacctcccttgtgcatatgttccctcctccctctcttcgactggaaacgcagagttcggcctagttcttggttgtggatctctgcgtctggttccatcaattactggatgagggctctaggatgatagttggggtattcatcaatttgattacagggataggccaatacaggcatcctctctactactgctatgagtcttagctgggatcctgcttgtggattcttgggagttaacctagcaccaggtttcttcctaagcccataatggatcttcctattaagatatccctttcgaaatgtccagagatctacaaggatgacatcaactaaccatctaagcaacagtggagaggctacattaaatgccctcccctgataatgagattgacaactaacttatatgccatcctatagccttcatccagcagctggtggaagtagaagcagacacccacaactaattactgaactgaactggaatccagttgcagagaaggagaagtgatgagcaaagggctcaagaccaggctggtgaaaaccacagaaacagctgacctgaacaagagggcctccagactgatcactgggaaaacagcatgggactgatccagaccccataaatgtgggtgtcagtgaggagacctcgtaaatatatggggcctcttgtagtagatcagtacttatccctagagtaggaatgaactttgggatagagggatactccctcagcctagacacactggggagggcctaggccctatcccgaaggatatgtcagactctgaagacccccctcccctggggagcagaaatggtattgggtaggtagggtgttagtgggggcaggggaggaggggagggagagggaacagggattgacatgtaaaacaatcttgtttctaatttaaataaaaaattaaaaaaaatgttttccccaaattggaaaaaaaagatatccctttcattgctcttatactgtatccctctctacctaggccatctcgttctctcctgttctcatccctcctcccccttatcccccagcccccaacttgccctgtagatctcctctaatttcccttcccagggtgatccatatgcccctcttagggtcctccttgttacctagcttctctggagctgtggattgtagcctggttaatctttgctttacatctaatatctatttatgagtgaatacgtaccatatttgtctttctgagtctggattacctcactgttggagaggatgtggagtcatgaggacattcctcccctgctggtgggagtgcaaacttatacagccattttggaaatcattattgtagtttctaagaaaattgggaatcaatctacctcaagacccagtgataccattcttggtcatgtcccaaagaaagtttatagcagcattgttcctaaaagccagaacctgcaaacaacctagatgcctctcaactgaagaatgaataaagaaaatgtggtacatctacataacggagaactactcagaggtaacaaatgatgacttcatggaattttcaggcaaatggaccaaactagaataaaccatcctgaatgaggtgactttgcactcttaatcttttgcctctacctctgaagtgttttgattaccacactgcatttgaccctttgttttcttgtttgttttctcaggtagattttagattgagtgatgaaggagatttttatatttagaaggttgctccattacaaatgtctgtgtacctcaaacaacactctagcaattatttaactggagaatatgtcaaaataatctgaaagcccaattgtttcattgatgaattttcttagcactttaatcttccaagtaagcagaagccaacttccacatattcaagcagacttagtcatacaaaaacattaaagtgaagtatttagtataaaatgctgtcttaagcatgactatccactggtttaatggcttcaacctttaagttttcaaccatatgtaatgtcgtggcaaagctatgagcactcactgaagctgggaagaccttttaccatgtgatttaaaaagttgactacttttcaatttaaaattctcataattggatctactaaaattcaatgccactggggacaaacaacagggaggagacattaccttgatgacttttgctgcattcaaatgccagtgacaatttaatctccagagtatttttattaggatagctatctttttggttaatgctctgacttcaaagttgtttcaaatttaagtgatcttgtttgaccattttctggaagccctgttatctatagtatatagtttttttttttttaaaaaagaaaacagaacaaaacaaaacaacaaaggatatctagagcttctctaggaagatatatatgacattatagcaggaggtatgacacctcttctctcccttgtttaactctgtgttgcatctagtttgatgttagccacataatttatgcttagcaaacacttgtttgcttttggtcatctgttgactcataaatatattttgctgtgaccttggagttattttctcgttctttttttctagtttgtgtttcctcgaatttttctatgaatggcagattgtttagatgaagataatggaggactttaaggtcaatcggaagaaagatacacatgagaaactagagggagagactggtctaaagtatacttttgatactctagttgatggggagagccacccttctttttttggcaccagaaaaaagactacgtcttttcctccacaagtctgtttgtgcgtcacaagaaggaaaaaaattaaaggaatgtaggtgaaatgagatcagccataagacagctgtttgctgaagccctaggttcacagttaagggacaaagtatccttgcctgaggctactgttttcttttttgtgtgttagtttccaagagagaccaatgaccctgattcctgcaaaaagaaaaaaaatggttgctgtgtgtgtctttgctttatactttgtttttcacattaaatagggaaaaatgctgaaaaacaaatgatgagacttaagacagggtctgaaataaccacaataaagccaaatgcaagtcccattaggaacatacttttccactttttgtagagattatagatcttttataggtggccaattggttagcaaatggagtttcgtcctgcctgaggacagcaaaaaccaacgttgcattcaaaacgtatcaattcagtttcaagtccataaatacatgtcatagagaaataattcatattacaaggcctttccctccctagctttttaaaaccacagtgatgtgtacaagtaggagccttcataattgttcagataacaatgttcaatcctgtttcttattttatttgtttggttttctgtgacaaggttttactaggtaactttggctgtcctggaacttgttatttagagtaggctgtcctcacagtcatggagatctgcctgcctctgcttgctcaatgtactattatgtcctgctgtgtctcctcttgcaacagtcctccaccttaggtgtttttcgtttgcttgttgaaattacagggtctttgcacatgttatcatcggttcctttgcctttgtggaatgctctctgtgcttgtttgtacagcaatgggtcaatacatttttgttaaatacttttctcagtaggctgagaagtccatgacgataaactacatttgtagtactagcttgctggtatttaatgtctttaagtagacttttaatagttaattcaaaccttatcttcttcaggaaggtgctcttccgcctctgacatatatactacataggttccccatcacctatttttgctccatgatgcaattcatttagcttgtttcttcagtagcctaaagggcagaaattaggtcagttttagccttccaacacaagtcactttttataccatctggcataaaaatgtttgccgaacagattattaagcaatgcttaaacttggtggcatctccctttgatccatacccacatttcttctagagggagtatgtgaaaatgttagccatatcattcattatgtttctgtagcacctattattattttttttactcagtatttcaggtagggtgacatttagataaattcaattatgtatgtgtgcaatgagtcaaagtcaaaatatacatcaaattccaagttgcgcatgagctttaagaaagcaaatgtatcttggagcttttgtccattgtatctgagagcacacactcctttgctgccgtccttggggaaatggctacttctggaacatagacatcttaccctcatgattaaaaagaaacagtgggcaaagaagatggtgggatttgagctcttttgagatatctaaaatcttttcactctgttgttcaagttacttgcgtcaccaaattcatcctaatgaatgctcactatattcatttggctccaaattcatttcagcataactaacttcaaattgaattatagaagaccaaaagaccccattgcccaaagttatcttggtcattaacagggttatggacatatttacggacttggtgtttaagctttattacaaatggcttccccagtactttgccctacatctgtgatggtttggtggttccttcagatgctgcttttggaagggctcttttggaaaagagtggggaaagctagttgctgaggatgaaatagtagggacctcgtttgggctgaggactatgtatgctgcttgctggtgctatataaaaacactagaagttgtctagggacttatcttttaaacaacactttgacatacacgatcttatttactcttcacaataaccctaaacctaaactagcttgggaaatcgaagatagaactcagctcaatagtaaagtgtaaagaggtgctttggttaaagagcctaatatcaccctaaggattacttggtgaggcactagtggctttaaccactaacagactgggaagaaagcaatgactatttctttggccacagtgcaatcatggcaacagaagcacccactctttccactttgacccatacaatctgtctaaggcaattaatcagaactcccagtggttttcctacacgttgccagttgccttactaattaaaccttcccacagagtgtagcaagagcacaccccctgagggccctctgactaaggaaggtatattgaccaacactagtgaaagttgagactcagttggcctcatcagtaaaatgcaccggagaattgtcctcactcagtttccctgtctctaaaatgggctctcctttatccgtctagactagttcccttccttttggtgctagtctatcaggaagtgaaatcagtgcttaaccaccacagaatgtcctctgtgaggctccagtcgccgctccgggcatgctcagtagcctggcccgctcagcaccaagagtaggaagaggcttttgcccgccnnnnnnnnnnnnnnnnnnnnnnnnnnnnnnnnnnnnnnnnnnnnnnnnnnnnnnnnnnnnnnnnnnnnnnnnnnnnnnnnnnnnnnnnnnnnnnnnnnnnnnnnnnnnnnnnnnnnnnnnnnnnnnnnnnnnnnnnnnnnnnnnnnnnnnnnnnnnnnnnnnnnnnnnnnnnnnnnnnnnnnnnnnnnnnnnnnnnnnnnnnnnnnnnnnnnnnnnnnnnnnnnnnnnnnnnnnnnnnnnnnnnnnnnnnnnnnnnnnnnnnnnnnnnnnnnnnnnnnnnnnnnnnnnnnnnnnnnnnnnnnnnnnnnnnnnnnnnnnnnnnnnnnnnnnnnnnnnnnnnnnnnnnnnnnnnnnnnnnnnnnnnnnnnnnnnnnnnnnnnnnnnnnnnnnnnnnnnnnnnnnnnnnnnnnnnnnnnnnnnnnnnnnnnnnnnnnnnnnnnnnnnnnnnnnnnnnnnnnnnnnnnnnnnnnnnnnnnnnnnnnnnnnnnnnnnnnnnnnnnnnnnnnnnnnnnnnnnnnnnnnnnnnnnnnnnnnnnnnnnnnnnnnnnnnnnnnnnnnnnnnnnnnnnnnnnnnnnnnnnnnnnnnnaaccttcttttcgggattccatttccctcccacctcttgtcagttgctgtttggcctcttaacacttggggtccagggcaggggaacctccctccgctccgtttcaaacacattggagccaactcgcagctaagtaaatcaagacaagcacgacataggttcccaggtccttcgactttgccagaaatccaaggaagaggcgcctgcgtgccttcccccccccctccacaccaccatgtgctcactcaagaaacatttcttcggaagcgcgtggttcgaggagagcgtgggagtggagcctacgggaggcccgctcccccaatatcccgctacagtgtttccacttgattgagaatgctcaaaagcagccctatacccttgatgtgactgacagccccgacagtgtagacaagtagtagttcatttcctgctgaaaggcaagacatctatggggcctggtgttcggttgggaaatactggggtttcttcagctcatcagttaaaagggttcctctttttgtaaactttctaatttcagtggcatgtggagaaaggggttacgagcacagattcagcacataaactttgcagcctctcatgagccctttaaagcagaagattcctagttcacatcccaagcacaagccacatgttgcatgtctatatttcatctgtaaagcaacaacttgattataatagaagagagagtgagactgtgtcatgcaactcaaaccatttcctgtggcatctagccatttggtctggacttacacttctcttttggctcctatttgctttcctattacagactgcccatatggggaaacaggggtcaaacatcaggacatacgaaggcttccattatgtgggaaaggacttccgctaggttaatcttacaaatttaaaatctcatcaattccatacaaacctgagaaagttatggaaattacttcttaatgtgccctgttattccagcctttctttacaaataaagaaactgagtcactttttttaacttgtctgtactatctatcacagttttaatgagtatctgcaccataatgaattcgaggaaacagttctgagtgtattgctagagtttaatgtatttagaattttttgtttgttttgttttttaggttctttctatatagtcctggctattctggaacttattatgtaggctaggctgaccttaaactcacagaaatcctcctactttggcctcttgagcatgtgaaccaccatttgcaaccaagtagtcgaagttttaatgaactgactttgaaattagtcagtttgtggtaagagagtgatctttcttcccccgcccccctacctgccccagtctagactactctgatcagtagtaaaaagtttaattgaaaagagaagttaaggaatagtttccatagtagttttatacatctagtaagaatcttccactttcaaggatactaaaggaaaaatgtttatctcaattaataagaacactgtggtaatattcttccttctctttggctgtttgtcctatttcatcttttatattttacttgatttgacaaggtaactagatagccatgagatagcatcactttcggttcccagctaacttcactgttccatagtgaacatagcttgatgcagtagctcaaatactggaaccctgagcataatactgacatgaattttcttccttcccccaagtatatttttgagctttgcatgatttctataagttaacatgtcatacacttataaaagcaggaatgcagtaaggcacatttttataaaaaagattttattatgtatacagtgttctacctgtatgtttgcctgcaggccagaagtgggcaccggatctcattatagatggttgtgaggcaccatgtggttgctgggaattgaactcaggtcctctgggagagcagccagtgctcttaacttctgagccatctcttcagccatgtaaggcacattttaagaccaaagagtttgaccaaacaatatgatttggtaaacttttcgaatgagttcacctgagatttttaacttaaagttttgcaaatagaaaactttagattttaaaatgtcaatgctctatattatgtatcactataataattcccaattatgagtgtgtgtataggagtcctgtatgataacaaaacagtcgtatggcaatagaaattgtttgtctgggttattgtgctgttaagggttcaaagctcttcaaaatatatgaaaaaatttgagtatgttcattttttttttggtttcttgccttctgttaagtttcttacaagcatccatgacttgcaggaaaaaaaagaactgtttcatttcaaaaggcagcaaaaaaggtgacagtagggtgattgaggactctgataaagggagaagagaaagcattggggacaaggaagagccatgcaagaaaaccctgatgcaataaaaagtttagatagcaatatctatatactgttcagccacaatggaagtttctgtcacattacaaaatttactggatcactgtagtctaatttttttaactatatgtcttgtgatacaattgcatctcttttagttgctcatggatttggaaaaaacaagaatatagggtgtatttcttttcagacaaagtgacatttatatcctcagcttattgatgtcagtgagaactttttcacattctccattcagaactgtaatgatttctgtttaaggttgtgtgagtcaaattttaacagatttcacctcagttatttttttcagataggtatcttcataatgagcgccccccccactttccatacatccatacatccatctgtctatcagggaaggtagttctttcaacaacacaagacattttaaatgatatattgctattagagttttggattttatgtaactttctggttaggcccagactgtaacatgctattaaccagcatgaatattagattaattagtaatttgatgtcaactgtggcttgtattttgttaaactgaataggagagaaagtgccctagagaagtgtaagggagaagctctatcttgtatctcacatatttaaagcaatgatttaaccattcagagaatgcaatgttgtggttagacagttcagttggtaaagtacttgcatgcaaatgtgaggactgagtttgatggccagtgatctggtataaagcctggtctggcggcactcattggttatcccagtgctgggggtaggagaagataggccgatcctaggagctcacaggccagccagcttagcctaaccaaagggggcccataatcctttgaaagagactctcaaaaaggaagtaccttctgataaatgaccccaagattgacttctggcttctacaaatatatgcctgtaccggcaaacacaagcaaacacagacacacacacacacacacacagacacacacacacacacacacacacacacacacacacacacacacgaacgaacgaacgacaagggagcgagagtgaggaggacatttttaaactgtatctaagacctccatcttccatcacaagatggtggatatagagtagtctgacactagttgaaacttttatatttttattttcttcttgtataatttctgaagttgttgcttttttcccccaactttttcatttgaattagaaacaggagtgttttagatgactttcccagttcccttctcccacccgtcctcccctatccccccaactaaaaccttatctgtcacatatcttttcagctccccctggatggtgaggccttccatagagtttcatcagagtctttcatatcctttggaatagggcctaggctccnnnnnnnnnnnnnnnnnnnnnnnnnnnnnnnnnnnnnnnnnnnnnnnnnnnnnnnnnnnnnnnnnnnnnnnnnnnnnnnnnnnnnnnnnnnnnnnnnnnnnnnnnnnnnnnnnnnnnnnnnnnnnnnnnnnnnnnnnnnnnnnnnnnnnnnnnnnnnnnnnnnnnnnnnnnnnnnnnnnnnnnnnnnnnnnnnnnnnnnnnnnnnnnnnnnnnnnnnnnnnnnnnnnnnnnnnnnnnnnnnnnnnnnnnnatgctcttcactggtccttctctgcatctgggtcccagttcagattggtgattagttatgggtgtctgcttctacttccaccagctgctggatgaaggcatataagtcagtcatcaatctcataatcaggggagggcatttaaggtagcttctcctctgttgctgagatagttagctggtgtcatctttgttgatgtccagacatttccctagtgcctgatttatggagatatcataatagttgttgctttctttagacagtgaaattaagttaataacttttgctgataggtgtgagaggtagaagaagccagaattagagtgtttaactgttaactaaaagtttactatactagcacactaatattctggttactgtataactgagaactgagtattggctatttttttgtaattgaactacgttttgattttcaatacgatgctttgagcttaatggttttatgtacagactttgattaccaagtattcaccataacttccatgtttggtgacaagaagtgctcacagtcaggctagggataatggtgcatatctgtatatccagcattcttgaagtaggaacatcttacatttgaggccagcctgggctatagggtgagacctcctcttcaaataatactcctagtcaagcgaagcagagaagggaggaagggagttaattatatgggggtgctataaaaatgttacagaggggcatttcagtcaaattggatttggatttttttaaggtttttctagacagagtttctctgtgtgtatccctggctgtcctggaacttgtactgtaaaccaggctggactataactcagagatttgcttgcctctgcctcccaagtgctgggattaaaggtgtatgccaccactgcccccaccaaattggatttttaaaactatctctttatgtattaaggtgcagcacctgctttcctgagtgctgcctctggggtattgatgtagagctcaccctgggtggtgaggatgggggtgaggtggggggctgaccaaccatgcaactacccaggcccagaaccagggctatgagttggcccaccccaacatccaccctatctatgatctgttggaggatgtgaaggggctggacctatggatccaaacctacaggatctaagatcttcctgatacagggcaacaacaggatatccaagaggagtcccagtgagggcccagtatagataatgcagcagaagccaaaccagaggcctggaaccagaccagtgactcattgcaatgaacacttgcaagtaaagatatatgggtttactgaatgactcactgggccacactgcagcttccacaatgagtttttttttcttaaattttattatatttttgggtggagctcgcaaggacagagggcagaaatgaagggagggggagatgaatgggatcaagattcatgatgtgaaagccacagagaataactgaaaagttaaaaaagagaccggcttatagtagtacacatgtgcaccaaggcttgaacacagctttgatttaagaaggggagaaaggcattctagataaaaaaaaatggcagcatatacaaaggtagagagatgacgaaatatgctgataaagaatgttcaactagagaggactggctggattaaccaaaaaaaaaaaaaaaaaagacccagcagaaacaaaaagaagttatatttatttgtggatctggccacaacgggatgggctctaggtcacagtagatttttgtgtctcatgttggagtttcgactttttttctaaaggtccgactaagttgttggggagattaaaatgctaaggttccctggttaggtatgtctttcagaaagaaatttagacctgtggaaaaattcctggaaagggatgctggagtggaggcagaaggtccgtgaggaggagcagagtcgtgtggtggagtttgccatttagagtcctggattctagttgctgctcatgtatgccctgcatcggaatctctttattcctgtaatccccatttcatctcgctcccgacaccaccctggatagtctcaccaaattggaagcatttttctcatttgtctgtaatgaattgcagtgcttttatagcctagccgctacctctgtgctctctttcttcctttaagccttcactggttgtttcatcttggtgaggaaggggttctgccttctgaacatttggctgccataagtttcagtgttatatactgattttgctttacagagattttcaagtgcttcacgacatggctcctcttttttgtttattcttataaatcagccatcaattattaactagggatttttttctctataatcagatatattgggagttacatcgttgaaaagagacaataacaacaataaaccaaacaaaaacaaaaaagaaaagtggtggttctttgtttttctttttgagatgaggtttcatttattccaggctggccttgaacccttatatagcttaggatgatcttgaacttcttattcttctgcctttacttcagctgctgagattacatgcttgcatgctgtatctggtttatgtggtgccaaggctgaggactcaacccaggacttcctatgtgctaggcaagcactctataaattgatcaatatcccaagcccctaactgttatcttttatgtgctatttttttgtttgtatgtacatgtgtatgttatcaaatgaactttcccgtccattcttctgtttcttcttagtcctttttttagagccttgtctgatcttgaattcactaagtagctcctgagctggccaatactggatcctgtcttcctccatatcccaaatgcatggattatggtctgagcctccattcctggttcctctgtcttttctctgagttagaatttcaaacaacttcttcagggtcatgagaaactccctcctccccttgtttgtttagattcttctgatgtcagagctggagctcccatgcagagagatagtactgatattacaaagtaccaagtaacagtttgctgttgttactaggaggcttcacaacaagctaaaaatgatacagattgtagagtcaaaaattctgggttccattgtcttttctgtcttttatttgcttgtgttctctggtgagcattaataccagaaatttcagcactttgattaatgtctgccctacagagatatggtttcttgcctaaaatgcttgtttgatttttgagacagggtcttgcaattctgttgcccgggctatcttttaactcccgacctctcaggtgattctcttgtcacaatccccttagtagctggaactacaaaagcatgccatcttgtgtgtctgatttgccagacaacatggcttagataaaatacagtaaacattaagaacacatttaggaaattctataaagttatagcaatatatattactgttagccccttatatcacccgaatcaaatgtggttatggaactggggcatagcgccacggtagagtgcttgccttgctttcatgaggacctgggctcaatccttgctctcctctccagttccctttgtttttgcagcattgcacatcctgtccatttactaatcatcctttcttctgagtgactgtagatgtgactggaacttttattcactcattttttaaattttaggttcatttattttatattatgtgtatgagtgttttagcttgcatatatgtgtgtgcaccacatatgtgcctggtgtgtgtacaggtcagaaggtcgtatcaagtcccctggaactggaatttcttagtgttttgaaaccaccatgtgggtgctgggaaacaaactgaggtccttgcaagggcaataagcgcttccaaccactgagtgatctctctatcccacactctgaatttttaaagaaaatgtctactgttttctttgaactgatcaatttcaggcatttgaatattttttaaattcagtaggaatgtatgacatactgtcttgtcagggagcttagtgatcttgtgcaaataaggaaactgagtcattcaggtgctatggggactgacttagagataagtttaaaagctatcacctctattgtagaagttatctatagcactgagtcattatgcttcagggactcttaaaagtaaaaagttattcagtctctcacttcttttgttcctttttgaacaatttataattataatcctccttagatttcactgtaagtactaagaactttgccagtagcagtatgtcatgtaagtgaaatcttactcatttctaacctgttcttaaaaaacactgtaaataccagtatgctctgaaaaagtatatagtaatgtatgctaatttatatgaatcagcacatctggttaatatattacctggtagccttagcattgaaatggttattattgaagatccagatttctctcattccttctgccagatttgagaagtatgtcatattatttttttcctgaagacagaaaaggttacatgacataataacatagttgtaatctttcagcctaacttggcctcatatgagggaaacccattgtggaagacagctcacaattggtgcatgtatatgttgatatgtattttcacatggttatttattgtgaacctcaggataggaagaaatatattctctccaagttaaaacttattaccccatcaggctgaatctgatttaccttcaaatgatatactttgaccatagttttaaacagaaccttaactgaatctcaatacttgctttgaaaggggtggcctagggaagaagacattggtgccattttgggggaaataatgcagaaaacacaatttttaactcattaccatttgcactgtctttgatttagtgaagatttttactgaattgctctgggaagagggtgctccattgctaccaaaaccttgagtaaattggcttcccatttctatcatttggtctctataaagtggtgcttctcataagtgagaagcttctaattgattcatacaagctaggtgcaagtcaaacacagcattaggaagaaattactcacaatagccattgactcaattactagtaattgtgatgcttgcctaaaggatgggaggatttgattacagtcctttatttttgagacagaatatcatatagcccaagctggcctcaaactttctgtgtagttgagggtacctctggacttctcaacctcctgcctctgcctcctgattgctggaactaccaacatgtgccaataatacacaatttacgagacaataggaattaagcctatgaattaattcatgaaagggaggcaaacactattatcacctgagctactgcctcagcccacaatcattttttaaagttattggttgtgctgtgatagttgtttaaagatagccatatgttttgataaattcaacattttgaggaattttaattgtacacctaatttgttggtcttaagagaaaagtaaaactaagttgaaatattttaaaacatagcaaaactactaaaaagaggatgtaatatggtgacctaccatttatttattactcagacagagcagttggttctctagaatttctaaatttactctatcggtcctttgttttttctttgctagaggattttaattcacactccagatatcttttcatttaactcctacagacttcagtctgcatctctaaaattgctgagttcttaaaaacaatcactatgccactgtcccatctttaaaatagtaatacaatgcttggtgttgtctagtgttgaaacccataatcaagtatcctcaattacctcaaaattaatttgattcttaatctaatgtattcataattaatgtatatagcaccaaactccttagataaatatacctttaaataatgttaaaaacttcttcaaagttactctacataaataggttcacctttgtctataattctgtaaaattaactatgagagttatctgtacaagtgtaagtagactggaatagctactctgtaccatagaaaatagattaaatttagacttctgacttcactttttttcattttgtgattgtgaagtggagtttatgtggaagaatttttttgccagaagtgctatagatagctgggcaaatgggaaaatattcttgaattctatacatataaaagatgcataaaattatttgacaacatgcacacacaataacatgtttagattactacttccattttttttttgtttttttagacagggttcctctgtgtagccctggctgtcatggaactcactcagctgcccttaaactcacagagatctgcctgcttctgcctcccgagtgctgggaataaaggtgtgtgcaccaacaccccccagtttgctaactgtacttttattaccaaataattgccaatttgtcaccttagataactttctttgttaattagtcacattgacatactctaagtgtgcatctagttgaccaggccagtgaatctttgccagaaactcagaattatcattgttttaaaccaggttatattaatgaggtgattgtgctgtggatgggtggagtggatcaacttgggaaaatggattctccaaagactgttttaagaaattgtataaccagtactctgtagataccagcttggtgctattacagagctgagaggcaattgggtgtataatttctctaacttcatgaacttttaaataacttcattcttgtaatctatgtctccttcttgactgagcagttactgactgagtcaagtgggtgattgtcctctaaacacataaatgagtgataattgttggggctccttagatagctggctttgtctccgtttgttttgcttaagggaaggaaagttctggatgtgttgttttatgtgctttgaaattaatcactggtaaaatctgaaatgtttaatagcatattaagcttgcccgagctatttaggaaggttctatctgtagatagcaaggcactgtgcttttatatcttggcctttaataacatgtatggtataatagtgatgtgtaattatgtagggttgggccctacacaatggtatcagaccatggagatcacactatttgccaacatatgccagacataaggctctgtcttcctggagtatttttctgtttcatacagacatctcatgtgggttgggtgatgatttaaaaccaaattgatttcatttttatacttgcaaggaaattcagcaagcacagggaatggttgaatatctcatatagagtaggtgtttttttaaattattctttatatgtaattatgcatatttgtttgtttgtatgtgcatgagtatattggatccctggagatggatttataggtacttgtgagctgccaggtgtggtgctaagagccaaacttgggtcctctggaagactagtaagctgtcttaacggctgagccacctctccagtcttctagaataggtatatttcagttgtcattcatttgtaataagcatattatgtgtatatctatgtaatataatgtacccgactgcttttggttttgaattctgaaatcctcatagatggatgactgtgtccttggggttcagcaaggctctgctctttctctactcctcgcagtgattttcttgacattattttttttcagagagctttagatagtcatggattgtatggataagactgtacttttttgaagtttgtaatgtaacttgcatgtatattcatttacatcacctatgatacaaggcgagaacatacagaatgttaagatgggattggcagagacagagcttcttataatatgctatgcagtctggtacctttcattatgaaatcaatgtttttcagaagagtccctgtgtatataaaacatttagcatgaaaataacctttcttaggttgcactcacagattgtttgtcattggcactgcagtagtttacatttctccccctttggttgaataactaatggtctttaaatggaagaataagtttagtaggccaagaaaaaaaaaagtctggattttatccatgttgggcagctcagattatttgtgtatttgtgttactaaaacagagtgtacctatgttctgtgatctctaaattcttgactcttcagtacagcctaaagttgctctatcaaactgttttcagatgctcttgtgagatctaaaccattcatttttatataagctgagttggcctgagactacatcctaaattctaagtagctgtgtctctatatcaaatgaaatgagggtttagttgtaactgaaagtagtgattgcacagggctgtaagccaggtttccacacttgtccttccagttctgctatagctaattatggatcgagttatattattgtattacattgcagatcctggcttttaactccctccgtcctttaaaataatgttattacttgaatgttactaatcccgaagatcatattccttgtcatgtttattagttttttgaagactatcaatgtagaagaattgtcattgaatgttaaatcacttgttgaatgtctcagatatttctgtaatagcatttctcattcatgcccattaccagccatgttgccatgaactagtggaaactccatttttgtcttaacatacagtacaagttttcaagacctcgaactatattttatagtagttaaaagtacttcctatgctagtaagagttgaactgagctaagtaggatatgtgtgtcatcttattgtttaaaaagcttgtttctgactatttgaggagatttctaagacatgaattaactttaaaatgtatttatggtcatatcattttttctatagtttttgctgtcagtttttttctctgtacaacaaaggggtagaaataaatgatctgaatgggcttcgttcagattctacatattaaggatcaaagattattaagaactttaatgaatctgccttaacacaaatgcattatatctagattttagttacattgaaagtgggaattatgaaagatcactgtttaggctgaatattaaaaactgaatatctcatctttatagttttgtttctagaatctgacttattctatctagtgaaggctatagcaacactcttttatcagtatacttccctttagagagtgttagcttagttctaggtcattctaggcattgagacatttctgtagttcattaaccaaataaatgctcaggctattgagagataattcagtgatagtcaacatcatgcctcttgttatgtttctgggtttgttgcatctatttgtgaagagccatacaaagaaggcttggggaatggtttatcagtttggaccagtgcccttgcagaggacccaagaggacccaagtttcatgcctagcatccatatctggtggcctgtaactccagaaatccagtgcctgtttgagcacttggactcatgtgcacgtgccacccccatgcttatagttaaaaataaatctttaagaattatacaaagtgtgagattttatactgtgtacccagtgttccaatttcacagatcattgacgaatacctaagacttcttgatcagagacaaagaatactatcactgaaaaagtaatagcaacatgtcaacacaatactcgggttcaccttaatcttaagtcccatagggtagatttggatgatgggtacaggaagtgagttgtactatagcagaggaacacttgagggatttgtcactttaatagtgacaagcacacagcctgctctttgctgggattgggagatgttacctcattctgaaaaccacttcttacaaacaaagccctgggaaatagcctgtataaaatcccagcagcacctttcagtcttgacacacagacctgtaatgtacaaggatggtctaggattgatggcggattgtctccctctgaatattaacacatttcaccctgacagacatcggtttgtagggaacaagaaaggctcagagcagctcagtaacttgcctgagactctgcaacagtgaacttggcatttaggcccaatgtgattataaaaatctatgttttaacccatcatttttctatactgcctaagagcctaaacctccgggttgctctaaattaaccagaagaccttgcagtaccgtggactggtgatgtttgggacctggcccacatttgcaccatgtttatgtataatttagaagacagagttcaggggccatttgtttcaatgttactgaaaatcccaagttaaaattctttgaattgctgccatgaaatagtggggaagatatgtgaccatttgcaaaagtgccatgggcacagaagggatatgactgtggattttaaggctacacgagcacagttcttaaaaatagcagtcttggtagtttgacctttattacataatttctgagtcacctcaaggcttgctgtgctttagcactgccattgatggtgatacattctctttctttctccccatttatacttgagtgctttctaacagaatacatggcaaggcccattgcattcttcactcttctttcccctccccattctctgtttgtttgtgaacttttctgtgaggcaaaactgccttggaaaactaatgctggctcctattacacaagtacacgatatgcattgtttcttgattagggaagtgccaagaaccacctaccttctcctgctgcttcctgtgtctgctttgcctaaagattggctgctataaaagtgtggtacaggcagccaaatgcaatctttttttaattagtttccagaaagtgttgtgacaaactattttagcgttggtgtgtgcctagtaagaggccttagtcgtgggcttaaaagccaaataattgcgagtgcctaatgtagtttgggctctacttctttcagctttaagcatcatccctccaaaaagaaaaagagtgcctttaatttaaaaaaaactataataggtaaattcgatcatgaatagttcactgtatgcctggagcctgcagtcaagctatttcacacttatgatcactattagaaattaatgagacataatgtttatgcatttttatgggataccctatggtaatttgacacttactaatgttagtgagctaaaatttccatgttggttcttttcattgaactttttaccatgcttgagagagaaggatagacatgatgagagggctagtaattaagcagatgaagaattttattgtttttagttttcaagtttttccatccctcaaaatccatgtacacagttacttttccattgctgtgataaaataccactgtcaaggcaccttctagaatacagtttatttgggcttatggtcgtaggaagataagagtccatcatggcatgaagacatggcatcaagcagcatgcatgtagtctgtttgaagcaggaagctgggagctcacaccttccaatgtaagcaggaagtagagagagcaagctagaagaggcctgaggttttaactttctaagaccatcctcagtgacatacttgtcccatcaaagtcatactgtgccaagctacgaccataagcccaaatgatcggcctaatttagactctggctagctcttttaacttaaagtaaactgtttttcttgctctgcctttttgccttgtggcttttaacctggcttcttgccctggttgtgttcccctcattctctcccctcttctcttgttcatttttagcctggatttcttctcatatttattctctatgcctggcagccccacctagtcattctctgcctagttattgccattcagctctcccttagacaaattaggtgccttaagtgggcaaggtgaaacaaatgcagcatgaacaaaagtgacacatccttacacacttacagcattattctgcagcataaacaaatatagcacaccctcaccttgctaaaataatattccacagcaacatagtgctcaaactcccataaatagtgcaccaagtaagtgttcaaatgctggagaccaggtgtgtggcagggttggggcatggaatccaattcaaaccacctcaccatgttagttctggttgctcatattctccttttatttttgacttcaaatccagaaagctttaacctgtgttaaggacaagcacataagaaagggatttgaactcnnnnnnnnnnnnnnnnnnnnnnnnnnnnnnnnnnnnnnnaggtgtgcctgttttaattcccaggaagcatttaataatttctggagacatttttagagtttagagttgggagacagtgctgctagtatacagtgtgtagcagctgtgaagatcctttgtatcctacagtgcataggacatgtcctctacacaaagaggtactcagccccaaatgtcaaggttgagacagattgaagggctggaagaccttgctttagatctgactttttctttatttagtgtggaaaaactcctgttggtagctagatagtctccttttgccatttgtcctctgccctgtattgagctagggtcagggcatccatgttttcaaggaagtaccagtcatatcattggccctcacaacttgtattcttatcttcttccttcctgctaatccaagcctgctggactggactattaccagctttgtgttatgaattgtacttcttatcacttatcacatttctgacaactaaggaaaatgtgtattctcttcctacggggtttaaaaggtgattttcattttgcttattgcttgagcccttgccagctcttgatgctgcacatacttaatgcttcatctatatggcttttaattattgaattgggatgtggtcttgccatgttgctcaggcttcctttgagctcacaatcttcctgcttcagcccaagtgctgggattaattgtgggtgcgaccacacctggtgatctgtgtgtattttctactctgtgacattggcttctctggtaccttctgcttctccacttgttaaattccaaagtcctagtcctttctctcgtctcacagattttccctgttggtcatctctccacaccaattaaggaaacagaatgcctccccaaataacacctgcctggagctgatgccagacttcagttgccgtccacatctctgttggagactgtgccatggcaagccaagggctgtggtttggttcgactgcacacggattaaaagggaaaatactttatgacagtgttcattttaatattctactctgcaagaaacatcaaacccaactgtcccctcatgtggtatttgtcaagtttaccctctgaagttgaggtttacccttgccacacttatcagccgacagtatttctttgttagtagttaccgactgacctttatgattctgttccagtttaatcaaggttaacttccctatttgaccattgaaagtcactttcaactttgtgctcagctcaccagaactgaggctattttgtatttgaggataatattaggcacctaactctaattatcatccttttctgtttttccttcatttaattaagccatgtactgcatcatcccacgtatttgcaataacctctcctcttgcacatttattcttttcttgtggagtctaagtattttccatccatttcttcatgtaatcattaaactgattttacctgcttacagatgacatgatcactttctttgctttcaacctacaatttcattttgcagcccacacagtcttactaaccatggtgctcattataaatgcatgctacaatgtatagtcattccatggacatcatctccttgctatgtatgaggcctcaggctgagggcctaagtacagttacaaacaggtcttactcttgagaaacttgtggcctattgagaaaagagagaggtgactgtaaagtcgtaatgtaaataataaataggtatgatgagtagtgtgctgtttgcagtgccacatagtgtgcccaatagagactggagagcctcttcagatggtatgtttgatctgggtcccggagcacgaagaatagtgtggtcagattttctgggccttttccccaaacattcaatttgtagatatgcctggttatttttactactgacaacttgcttaggcaagctgctcagttggaagaattctacctttgaaattcttcttgttcaataattaatcaaatgtcataaatgttttataggagcccacctcagcattaagataagtaagcattattagggctaagataagcaatttctggctgctatgtacacagaattggagaatatggtgttctaaacacatggtacaggatggattgtggttcagtgcagatgcaggggtaaaggtgtttgggaacacagatgagtttcactttaaatggaaaatagcatggagggctttctgggaagatatggataaaaagcttcttaaaaagtatggagattgttttttaacaagtagtagagcgaggaaaagcatttccttcagcgagaacagtatgtgtgtcatagtcagcatgggcttacaaataggaaggcattgtagagtggatggcttacgcacaacagaatttagtttatacagctctggaggctggaaatcgaggatcaggatgtcatggataggttctgttgagggtcctcttgtgggttacacactgttactttcttgtggtactctcacatggctgagagctcagtgatctcttgtccaatccttactgtcattcaaaggccccagaaactttctaataccattacaccagaggggacattatttccatctgaatcttcaggaaaaactttcagcatacaaggcaaaattgcaagggcgctaagaatgaggacatgtttgagcaaagatgcaggatttcagggaggctgggatatgtgtatgagagtagctgtttatcaagatggggggattgtggctcaaccacagtgagcatcagatgctcacgcaaacactttgcacttcttcctgtaacctgcatagcatttgagcaagtgagtagggggagtaggacagtgtaattgaagctgattggagcttataatcagaccttactcgagttttggtaattggaaatatcatgaagtctaaactcttgttaaaactttgtggtaattgccttgtttgcagtgtaaatatagagtgtccattaattttgatacccattggaatgttttaatttgacagatttgaacctgtgaaattaaagacacaccataaatagcatgcattttgatgacttagttttgtagcaacttaattggccctttctcccacctcgctcctctgtagatctgttcctctcaagtttgcattgtcctaagtcaagctcttgttatttctctcctacaaacaggtactggcttaaaggtcacctaacttacatcacaggatttgtgctgtcaaaccaaatatgtaatgttttggctggattatagcctgtctttgaaatattccaagagaagcacaagatttgtgacatatgtaactgggtaaaatctagcttcactaaagtacttctattgtcatgtgtggaccacctaccacaaaataagctaatttggaaacagttatggcaaagcaatcttagcactgccctttactaagatacattgtcggcttagttttattactacaacttttatgatgagataattagtaattcgattcacatatgaatttgagataagaccaggtgaatagaaattggtccacaattgtatatatctgcgttatcaagcaaatatgtgcttatgtctagttcttatacaaacctacttgaaacatgagtcatactatagttgtggtggctattgttcagttgcttggaacattcgactgaagtgtgtatgtgtgtttatatgtgcgtaaatgtaggcttttgaggtttatctggtgtttccttaaaaggaaactcttttatttttcattttaatgggatgaatggttgtttggtgtttcagtctagctgaaagcaagtgttgcagtccttgatacaggactcactttgtgcctgacagctttctcatgtgagaaatgtgattcttgctaaatctcttctaagcttcccaggcacaaagcatattactgtaaacgaagaggacaggaacttcctgagttataaatacataaaatacatagccatatgaaaggcccttgtggaggggctcccctggtatgttgagccaaaaatactgtctggcctgttcttccccctcttcttactgatgttgccttgggaattggaagctcaataatgactcagagtggtttctgttttgtttctttctcagggacagccatatgtggtgccatgaatactatgcttcttaggaatgtctctcccagtcaggaccatatgacttcataccacagagttacaactgtcagtcaggagcatttcctgtgttaacctcttctcctattttgcttactaggatcgtacacttttcccatagatagcacgatagtatataatatctatcagtttccaaatgctatcttgagcttttaaagttaggaatgaaacactggtatttgttaggaagaaattgacgttagtagacagaataaaagtatgcgtcagcacttagtaagtgacttatgaatggctgggatttatacacaggaagggttaataatatgggacaaaataggctaggaactgagtcactaagaacgtcttcctgttcctttatgtgtgtgtgtgtgtgtgtgtgttcatgtgtgagactctcacacttgccaaggggcaaatattcatttagaattgcaaaaaaaaaaaaaaaacactttagcattcaggaaaccatggattttagtatgtacaggttcagaacttccacatatatcgggcttaaataaaagtttaagacatgggtctgtttcattttaaggaagtatttgctaccaggacacaataagttaataaacaaaatacaattgatttgtagaacactatcttaaatttcagtgctaattatcactacactgttgttttctaatgtccagtacattgaacaaagccatttttaaatagtactaattgggttcatatatttcttgaagatgtgtttatgaatgaacactgctgtttagagttgaaacaagtttaatattaagttgtatttccctaggcatatgttggatgagaacaatgaaagtattttgaaggcattagaaatatagttcccatttcctttaatgtcctcataccttttcatctagatttctctttatgcagatttgttaacagtcattgaaccattttgcttcaaagtcaccaggaaagctagctaaaaaatgtagattctagagcagcatgaatctaatgaaccagaattcagtagtgcgggcccccaagaatctgcattaataatctgcctaggtgattctgtactatacagtgcgacatccactgatgtcttagacggtttgcaaaatggtagtcctgcaagtcatttctagctcacagatttggtttgtttgactttcagtgttgactttaaagttttgcaatctttaagaattgggagttcacgtacaaaccaaatttctcggttctcttgagtcatcagaacatgtttacagtaatggctccatgtttcttcctgggttgtagtaatccactccatacaaatgaaatctgtgaggggggcatgtgctctagtgtttaacactctccccaccccctaacctgcatgtcagcctaagtcagttaactgatacttatttctctacagctgacccacatcatacatactcagaatttttatgcattcaggtcttcagctgcaggatccatatatttcaaatagtgaggagaaatgtttgcaaagaggtgagataggtggttggaaatataagagaagttagagtcctagagaaatgagcctccgatgctgggcactgagcctcttgagggggaaaaagaagagtatttgggaatgaacagtgttagtgattgactgagtttggggtaggaactggatgggagtctgaagaacagtgccatgtcctgcacagctccagggacagacctgactagggcagcaagagaatgaagacagataacacagacacacaggaaagcccgggtaggtggtttggtctctctgatggaaaaaccacagcatcctggaagctcagtgtgtttattacatgcagttgaagagagaagagggcttattgcacacagccggacaaggaggtggagttactacatacagttaagcaaggggccagggtttatgacacacaactaaatcaaggatgacaagtttagctaatctcagtgggagtagtctctgtaggggagcagatttcagattataaatatctgaggggagaaagctgtggtggacactttctgctcacactatcaatatctatacatggaccacggtaaggctttgccagccctctgggcctcaccccaggggttggagaggctttgccattcccataggtctgaggctgtgggttccttggtatggcccatggctgtgtctgtgtcaacagcacacacccttcaacacttggctcatgcaaggctttttcttctccctacaaacaggcacggtataatgttgggaggtgaagttgatgaaagacacaggacagtaggtggctgtgagacatcactgctcggtactgagatgttgcttgctgtggagggtggatgctcttctgcgttggagaagttgattcctggatggagtatatgagaatctcctgaagatatgtatgaattgaaaaagtgtgctaaaaaacctctactgtcttttttaatgcaagcaggagaaagaaaaatatctactcaattgtagctggcaagaatagacagaaaacagtgtgtcctctaccttaagctaactagggcagagatacatacagagtccctgtgtggaggtgtttgcaatttccctccaaaggggttatagattagcaaagattggcaattgcagtaggacaccatgatgacacagtgatttaataagagcagcttctttctggcaaatctgaagtttatcttctctttccctttatcttttctgcatttcaaatgctgctctgtgtgtattctttaatctgcagactctgggagcatgctgtattgtaagaagtgtttgccagactttttttttgtttctgtttttatctgcaagaaattgtttctttgggaacatgttctgaatggaggttgctttcccagggtagcagcacccccttttcgaatcctacttaatctacattgcagattagctgctttattaatagcatcagcctgatctgtggaagcagacgtgtgccatatggtataggaacaaagaaaaagtccctttctttctgctagattctgggctgaccctaatctatattttcaaatcagtcggtttatctttgtgcttctctaactcttctttcgtatcatggtgctctctgtttagaggctgctcctcttgctgtgactcccactccaacaacttgctacttcttcattgtccccagttacatggccatttcttctttccaaactcttcatctctgtgtagtcgcttaactcttaattatgaggaaagaacttggttattttaaaaatcaccttttgtggtatatggacataaatgcaggaaaatatcaatatgcataaaacgtaaaataaaattaaaacatctatatcgagacagtttttatgtagaataatctactcagtgacacattttctgttcatgcatctaatcgaggttggctttttttcttttctttttccaggtagggtttctctgtgtaatagccttggctgtcctggaactcactttgtagaccagagtggcctcaaactcaccgagatctgcctgtttcttaattgtgtttcctttggcttcctcagcccactgtatcttcaacatgatttatctgatgtttaattcactttgttgctgttttattttatttttgtgaatttcatatacaattcatgatggctaagtttgcttgtcaagttgacacatttgggaagaggtaaccacaattaaggaattggctttattggattgcctgtgggtatgtttatgaggcatgttttttctccagatgatagaaaaagaccagcccaatgaatgtgatgaataccatctctcaaaagctagctgagcatttcagatgagcaagccagtaagcagcactcctttatggtctctgtttcaattctttcctcctgcattagctcctcaattatagaaagaaaccctgtcctccctaagttgctttgaattgtgatgtttattactgcatagaaagaattttatataggaaagatatattatataaaatatatattatataaattannnnnnnnnnnnnnnnnnnnnnnnnnnnnnnnnnnnnnnnnnnnnnnnnnnnnnnnnnnnnnnnnnnnnnnnnntctgtttttgatattgtctattgacttccttctctgatagaagaggattaatctccctcaccacccttccttcctgttcttaccatcacaatacaattattactatttttagtttctgtgtaagagatcttcgatctttgtttgtgtaatgtgtactttatttgagacaatgaagataaatgtgagtccacctagatattttataattgcccctttgcactctatccttcttctgtatttaccaaaaggaaaaaagggaggagtcctgattttgcagtgtttccccatctccttatgctgaccaccctggtctggctagcctgtatgagaatggtaggcatgcgtgtatatgtgtatgtcgtgtgtatctgtgggtgtgcatatttacaagtttacacaagcaattgtgtacccagggcaaagattcgtatgtatttcggactttttgcgtgtgagaagagatagtaagggtcgacctggagtaatcaaaagcctgaacttgtccatactccgtgtaattattcttcagtttaaacactgttcctttaccttgatggacacgcattctcagcatttgcaatcactggtttttgtagcagtgtctaacttaaattctgaccttaaaggttctgtttattttttaaaagactttttttagaacagcaattttaggtttgtagcaaaatcaaagcgcaaggagttggtacataacttcagccttcacagggtacacagccttccttcctatgagcatcctatgccagtgtggggactttgttgcagtccaggaacctacttcagttttagctaaattgggtagaggactgcagttgctggatcatcctatgagtgtatttgagttttgtagggatttactaaaatacctttcgaggtggctgtatcaaggattgtgtatgctctgcgtctagtatttctttttcatatgtaatttccaatcattattatctggagagatgcctcagttattaagaatattcactgttccttcagaggaacccagattcagttcctagcaccaacatagtggctcacaacccatctgtaactccagtcccaggggatcctacattctcttctgacttccacaggcaccaggcatgcacatggtatatacacatatatgtagnnnnnnnnnnnnnnnnnnnnnnnnnnntatatatatatatatatatatatatatatatattctctttatagtttttacaaaatattgtgtgttattctattttagagggaggaaaggttttagatatggtcttactatgtagcctttgctggcttagacaccctgtgtagcccaggttggtactgaacttgactttatcttcatgtctcagccccctgaatgctgaggtatacatggtatacaccacttcattggctctgtgtataactctttaatatctattcttccactagttgatagggtctctctctttctttttttttgttaaatgctttcttaaagcatgccccatctttcattttctcagctcagtgttttgtctccaatatctgaaacagtgtgtggcattttcgcaagtatttctgaaattttattatatgtatgaatgagtgagctgatcaatcgataaaccaataaacttgatgaatgttctctttgccatttgatgaataattatgttgtggcttggtaagtttgtttgcttgaagactttaacatagaagacagaagaacaactaggtaaaatcatttggaacttgttaggaaatgggacaaaaatgttctccaaatgccatcttctgtaggtaaatttctctctctgtcttgctgtctttctctctgtgtatatgtgcatatatttgtatgtatttaagtattaaaattatatattcttaatttaattattttgttgtggttattgacttatcaaggaaaatactactttttctctgtccttctgtttctgtttctgtgtgatagtttggatgtgtgtgagtaggctcacctgtgtgtgtgagtgtgctcacctgtgtgtgtgtgtgtgtgtgtgtgtgtgtgtgtgtgtgttgtatgcatacatatgtgtcatgtcatgcaccttctattgcagtccatcctatttgtttgagacagggtctgttacttaatctggagtttactgtgtcatctagcctgactggccagcaagctccagggatccacctgtcaaccccacccccagcactggtattataggcctgcacttctatgcttggatttacatggttattagggctctaaacttagttcctcatgtttgtatggcaagtactttactcactgaggtatttactcagacaattctttctttggctatannnnnnnnnnnnnnnnnnnnnnnnnnnnnnnnnnnnnnnnnnnnnnnnnnnnnnnnnnnnnnnnnnnnnnnnnnnnnnnnnnnnnnnnnnntttttgcgaagatctggatatggtttctgataatcacgtatatatgtgtgtatgtaagtatgtatatttggagacaggttctcactatgtaacagtaactgatctggaactctatgtaagccagactggctccaactcacagagatctacttgcctccatctcctgagtgtcatgcttaagtatgtatcccaccatgacttactgataaattttatcatgtagaaaaaaatctagaccacatagtatttattcagactattcatttttgtggaacacaatagcgttgcagttgagcagttgacagtgaaccttagaacaaagactttcaatttaaggtaaatattaacttatgatgcgaggtatcattagtgtcacatggagttgaaagtgatagtctacagacagttactgctaaacttcactgtttttttgttttgggcaggttctcactatgtaataaaataccctgaccaatgcaacttatacaagaaagcatttaatttgaggaacctcatggtggcaggaacagctgagagcttatatctcactgtggaaattggaggtagagagagcgaactgggaatagtgcaggagtcttttgagacctcagagcccttccctagtgacacatatcgtccaacaagcccgcacctctcagtccttcccaaacaggtccagcaactgggaaccaagcatttaaaaatgtgagtctctgggaaccattttcatgcaaaccactataccatttaactggctggtgtagaacttgcaccaggctggcttcacaatcacagagatctgcctgtctctgctgcaaatgcggagattaaaggtatgcagtacctcaactggctaaactttattctctaaagaaaaattttctacgatttatttattttatgcgtatcggtgttttgcctaaccctacatattcatatgctccacatgggtgtctggtgcccatggaggtttaaagaaggtattggatcctttcagactcgcaatacagatggttatgagccaccatgtgggcgctgaaaatcagtgctcttaaccactgaaccatctctcccgccttaaactttaatctttatgactgaattagacatgttcttccatggtaatattcgttagatggtgaaaatttttcttctgtcagcattggcaatagtagccatagtcaaataggaagtggaacacacacacacaagatggaatgtgatgttctaccttactcttgttcttgcttcaagcttcagcgacctagaggagagtatttgcaagaaattgttcaagtaattaagaaaaagtctcccgtgtttccctattgatttaaaaagattaggatttgagggattaactactatccagtgagtacttatgcatagcccaaagtaggagtgttataatagaggatggtttacaaatcggatgaaaataagatgtttcctctttttcactttgtgtcattttaacaaatgttttctcttgtgacattgctctaaaaccaaaagatcaacctaaggggcttatctatttggagttttctcatttacagtgggtcacctatacaacactttcgttttgttagggcataaaaatctatattagtattttgctaaaacaaggaatgcaactcagtacagttagagattataaaaaattaacccatatattaactgcaaatatgtccaatcagtatccccagtaaagtctagatataaatactttcatatgtaatatgagaaagccacttccatcacactctgcccccttggatagttttaaaatttgagagggaacaagtgatgtgaatttgtatattctagtgcattaaaagttaatccttgtaaatggaaattgttgttgtttattagataccacaaaaactgacatacaataaaccaaaaatatttaagaagagcataatgctggcttttgcatatgtgcaaaactgtctccatagtcaaggcagtaaacatatgccccaggcttagatatgctatgcccatgataaatcctccaacctctattttccctttcatgtaccaagaatcagcagtttgcagttttctcaggactttggaagtttctgtgtacttgatttttagtaaaatacagtaataaaacctggttacaatattcttccttttaatcttaattatttgacttatcttttcaaagaactgttttacatttttcctacagtggttttattttcactcaatttttctgtttcttttgatgtttttgtttgcctaaggtggcaactataggtctttgagaacttaattttatgatgaagagatcaattgctctaaatccttcctagtgtttgtgtggcatcctgcagttctggtatactctgattttattgccacttagtttcaaatttctcgtttgtattcatctttgatttatcagttatttattagaattgttttatttttataaatattttgggattttccagaagtatattatgtatgtgtcatgaacatacttggtgccacaagtgggcatcagatcttctagaatagtggttcatgacttgtgggacatgacccctttgggggccaaacaacctttcacaacggttgcctaagataattggcagctattcatattatgattcataacaataacaaaattataattgtgaagttacaacaaaatgattctatggatggggtcaccacaaatacagaactatcttaaaggatttcagcattaggaaggtcgggaatactgtcctagaacttgagctcatgatagttttgagccatcatgtgagtgctggcaagggaatataggtcctctgcaagagcaacatatgctcttaactcctgagccacccctgtggcccccaaatcttttgattttcatttctttttttctagtttttatttaaatttgaaacaagttggttttacatgtcaatcccagttccctctacctcccctcctcccctgccccccactaaaccctatcccatcccctttcagctccccagggagggtgaggccttccacgggggatcttcacagtctgtcacatcatttggagcagggcctagaccctcccccatgtgactaggctgagagagtatccctctgtgtggaatgtgctcccaaagttcattcatatactagggatacatactcatctactaccagagtccccatagagtgcccaggcctcctaattgacacccatgttcatggggtctggatcagtcctatgcttgtttcccagatgtcagtctcgtgtccatgagctcccccttgttcaggtcagctgtttctgtgggtttcactagcctggtcttgacccctttgctcatcactccttcctttctgcaactggattccacgagttcaattcagtgtttatctttgggtgtctgcttctgcttccatcagctactggatgaaggcttatgtttgtctttttgtgactgggttacctagctcagaatggtttcttctagttccatccatttgccttaaaatttcaagattccattgttttttcccactgagtagtactctattgtgtaaatgtaccacattttctgtattcattcttcagttgaggggcatctaggctgactccaggttctggctattacaaataatgctactatgaacatagttgaacagatagatgcccttgtatgaatgtacatcttttgggtttatgcctaagagtgaaattgctggatcttgtggtagactgattcccattttcctgaggaatcaccatactgattttcaaagtggctgtacaagttggcaatcccaccagcagtggaggagtgttccccattctccacatcctctctagcataaactgtcattggtgtttctggttttagccattctgacaggagtaagatggtatctcagagttgtttttttaattctttaattactactcatatttacatatccatccccccattcccttgacctcccatcctcccatgttccccacaaacacccaatccaccctcaaatgctccccagggatagtgaggccctccaagggggaccttcaaagtctatcacatcatttgggggagggcgtaggccctctttgctgtatctgggctgcaaaagtatccctcctttgctcctccctccttcctctgcacaacctgattccagtagtatggttcagtgcttagctgtgggtgtctgtttctgcttcaaacagctactgaatgaaggctctaggaaaggtagacatcaatctcattataggggaagggcatcaatggcatcctctccattctaatacatttcttttgtggccagtgaatacactttctgtaacttaaatactttgacattcattgaggttgtaatttctagtaaatgaaccatacacacttgagaggggtacatattgctttgtattgagagttcaagttctctgtcttcttgctttctggctcccaattcctactaactttcttcctccatgttctatcagttgttgagagagaagcttaatatttttgagtgctatcgtggctttgtctgtttcatttacaggaataaatgatcagaattattaattctgattcctgattagttggcccctatatcattatgggattttttttctttcattccaggtagtgttttgttgttgaggctacagtgtctgacacaactacaatgacctttttataagtattatagtaaggtttatagtctttcatcttttacataccagtccctttaatgctttttccttgtcattaggttttagcaatttgattacaatgagctttggtttagcattctctgctggcctgcattgtgctttttggattagttggttatatattttctttttaatcaaattgtataaattatggtcgatgtaccttttaattatctttgatcttcttgtctttttttgctccttgggattttatttgtttattttttggcatgcttaaagtttcattttcatttgtatggtttgtgtttcatcttatcaagtttctgtagcacatgttttctggtggccatctctaatgtctatttgccattagtcctttaactgaattttttgcttagacattgggattttcctctctagtccccctcccatctattgatctacttaaaattcccaacatgtgggacaagttaaaaatttttaatgcttagtctactaattttaatatctggagcagatttcattgattttcttttctcattatagatctactttaccacaaatatggccattttttggtgcattaatatttattaaaacttttgttttacagataaaaatttatagtatatatttttgttatgtataaaattatatattcacatattatatatgcatatataggttaattgttttctaagacaagttctcactatgtagttctggttagtctggaactcactatgtagactaggctatcctcaaacttgctgcttctgttgacaatctagggttaagggataatggtccacgacttggtgattttcactttttgagacagggccttgctgtgtagctcaggctggccttgaacttgtggccatcttctgacttgtctccctagagtttgagttgcaggtgtgagccaccacatacaaattggattgacaatctttaaatggatgccagattttgtgtatttttccttgtgaagtgctagtcattttttgattcctttaattttcatattcctagatttttgccttatatacatgtgccgatagtatgttgctgagtagcagggtagattttccacaaatctatgggttgttttgttttgtctgcatggctccctcttttctattactgtttgttgtatgtactatcttttaaagatcactgtcctatgctgtctattgtccattaggtgagaaatcatttcatgaatatttacttctgggccaggagaggtgtcttggtgtgtaaaggctatggctgccaagcctgaacaatcccctgttttgaagcatgagttcaatccccaggacccacatggaagaaggagaaaacccggttctgcaagttttcctttgatctccacacaaataccatggcaaacatgtgcccccccacacacaattgtatatgtatatgtacatatacaatcaatagaatgtaataacatttttgaaaaaagtatgtctgttttatgtatttttcttttgaatatgcatgttagttgtatttgtatgttaaatcctatagtactaggagttatagatctgttttttaannnnnnnnnnnnnnnnnnnnnnnnnnnnnnnnnnnnnnnnnnnnnnnnnnnnnnnnnnnnnnnnnnnnnnnnnnnnnnnnnnnnnnnnnnnnnnnnnnnnnnnnnnnnnnnnnnnnnnnnnnnnnnnnnnnnaaggagaactgaagatggaatgtaaaatggaacttaaaaaataaataaattattttaaaactgttcaccaagactttctagcattcctgtttaggcttcagcataatctttgggattcacctgaaaattggcagctcaataatgtccatacaggccacgtggcaaactcaccttattttgctcagtagatacttggcgattgtttgattgttttctttacaaaacttaaggtttattcatacaaactgtatacatgtatcttttcccagatttcaaaatagtttttcttacaaattttactctcttgggtcataaaatggtatctattcctttgtatttgctgattgcaatactctcttcttgtaaaaatatttccagtctttagttcctttaggcacaggaacacacttcaaggctaccagtaaatgcctaaagcaacagacagtggtcaacaacttaggtccagtaaggttaactaataataaagtagaataattatatcagcatactacaatataagttgtgtgaatgtattctttcttgaaagtgttaaggtgaatgttagcattttgttgctacagttgagcagaaactctggaagcagaagtacagatggggtgggattactgcagagcacagaaacaggaagtcagtcctgacaacccgtttctagtttatccttttagtaagcatgttttgctgaaccccataatgtttgagatgttttcacaatggatcattgtagaaaactcatatgtaactctaagactttcaaacatacttcagtttgcttagattatgttgactgtgtggctttaagctagaccattctcattcgtcatgctggctgtgagaagagaaggcagaagaaaatccaaatcactgttcagtaagaggaaatgttatgtttatgctggatgagtcacatcaacatggattttggcagaaaagtttctatcagtttgacaggttttactcctggctaatttacttcctgagaacttgcaatgaactactcggttacagatggctgtttctgaagtaatccttcctgatttgctttacatttcagtattttccctgtggaaactctacaaagattaaactatatagtatgtagactctagaagacattttagttttttttttaattcttacagattacttcattttgttacagatttatttttatgggttcttgatcaaattgataaaatgactttaatacaacaatccagaaggaagagctaggatccatttattaccatctgaaaaaaatgtcaggaaagtgtttgagcagctgagtgggtgagggagagggtcttttggaagaagagtatggaccaccaaggtgtgagcagaagcaggatccgaagagaaactagaaaggggtaaaaggaaaagttttaccccttttaccccctttacatctacttttgatgtagaactcagaaaacagagagcaattaagatctgtaagcaactgcatagcaagtgggaatctttggagagaaagggaggaggcagagagaaaaagagacacagagacaacaaaagacagagacacagagagaaaaacatgctgagcagagcatcaagataagtagccgtaggatttgggcttgattccaaagagaaatagggttaaagaaaagttagactcttcctattagaggtcagaaaagtaagcaggcttaggagtcaaggtctccaagcatcaccatggatgcagagatgtctaggttgtgtaagtacatatcccattaatcccatagttatttcttccattttatttacatatcttcagggagtgctttcctgactagatgattgataagtcaagttggatgaattcttaggggaaatgactactgtgtctttgtaatcttaacaatgatttggctagtttagaatgtctcaagaacccaaaaccccaaaactaagcccccacaaaagaatttcatctctccacccattataagagctagaactcagatctcagttttttgttcattgtcctggaactcaaagcttagatgaggctgtcctctaactcacagagatctgccactctcaagcactgggattaaaggtattcccaacttcctcatttaaaagtaatggaaaggtctgggtcagaaaataaaaccaacagcagttttacacaagctaagttcataggaagcaatcttctaggcatgcgacctttgtgctctatagcccttgcttgaattctgaaatcggctatgtaaatgttgtaagacagtagggtgggaacttacatgagtttccttctaagcaaggaatctagtaactgttccggtgctgatgagtttccgtctgtgcagtcaagagttgcactatataccatactatggtatttgctatgctttttgtgatggtgtgtttttggctgacatggtgatgttgtatacaggccagggaatgttacccaaggtggtttgatttaacttctttgtgcatatgttcactatccacaagtagaggtagtccctacattacagatgtactttaggaattaaattagagccctaacaataatgcctggtacccagtacttagtgacccttaattctcagtacccgtactgctgctgtttgcctctttaggtttcactaactttcctccaccctccatttgagcatgcaaattaaaaataaatagcattccctgttattgcccttcagattttttataacatcagcgattctcattccttcattctttccttttcttcattctgtcttgtacattgtcttttttgatccgtctcccttcatctcctgtttcacttcctttgctccctacgtttcttctatcctccactggatttatttgactttttgcattgaaactgggcagtaagaaaactaggccaagtctaaattgctgaatattgttttgtgggtgagacatttagaacaattgaaaaagaaccttaggtatgcggttatgtactgtggaggtgatgtgtcattattgatcaatatggagggccatctttaacccatttatggagcatattccaaagtataagactcagttctaacttgaaatccctactttaaagttggaagttatatactctaataaatattgtagtaaaatgtgaaccagggtgttggggttaataaaaggttgttttgtggtattttatgccctctttaatgccttcgccaaagcactggtccttgtcagctactgatgattgacgccacatttcttaaagttttaagaaactgctacttcttcaaagtctaagttacacattccaggtgggtattgtctgtagctttgggtctacatgtagtattgtttctgtatttcatgtgaaaaagtgcttaatttagtatgttcaattactgtattaaaaagggaagagcacattttagtattttcctaagataaatgctcaccattttaagtagcagtgggcttgtatatagtttatgaaattttagatcttacaaggtcaatggatatctgaaaatacagcagccttttaacttggtggatcaaatttatacttaagctcttgaaagagttcactctaagtactcttgaggcagtttttataaaggcatttagatcccaggatatttcctttaatagaaggggtgcattgccccgtttctcatttcagctactcaaggtcctagatttggagtgtgtcttcttctattcgctttctgaatactttgacttgaaataagtggccagttgtttttcttctgtctccttgtggaccattgttagtgcacccaaccttgcctgtaatgaagaaaagcatttttataacctgattctaattcatcgtttttcatagataatgttccaaaggacatcatagttggatctccttcggtcatnnnnnnnnnnnnnnnnnnnnnnnnnnnnnnnnnnnnnnnnnnnnnnnnnnnnnnnnnnnnnnnnnnnnnnnnnnnnnnnnnnnnnnnnnnnnnnnnnnnnnnnnnnnggtgtgttgtgtgtgtgtgtgtgtgtgtgtgtgtgtgtgtgtgtgtgtgtgtgtgtgtgtgtgcaataatatgaagttgacctgtgaatttaaccatcatttgggagcttggttctgtaggaaaatacagcgatagaactacaacaaatctcatggctataaacagcttatgtatgtggaggatttctgtagtatttattgattatggctattaaattagtcattttatatagagtaagtattccatattagaaactagaattataatggtgagaagtcaatttaggtattttgtaaaattcttggctatccctgtctttctggcatattaatttggggccaaaactcaagataacacagcaagagaaattctgtaaatgttgaagcacatttatattttcatttcagtacactgactgttaattattctatcagttgtatgacatttaagttcaaccttctagttcctaattggccaaactgttatcagtccaaattatttggcattgaagaaaataagaaagtctacagaagctattaaaataagattagaacttttcaaatttatcctggagaagttagactttctcttgcattaaaagctctctctctctctctctctctctctctctcacacacacacacacacacacagagagagagagagagagagagagagagagagagagagagagagtactattagcaagtttaatgtggattaagtgctaggtgcaaatatatgatacacatccctgttaaagcttgcttttctggttgaaatcctttgttggcatcggtaatgttcaagaattatggaaggggttaatggactcttcatattttctggctttatctaaactgtgttcaatatattgataaacaaccccactgttctaaagtctagggggcaaggaagaagagtggtgagttttcagcctgaatatctttccactaaagcatttaagtgtttcacagtattaaaaatactgaagtcatttgatttgttccataaatgtgtaagtgttatcactttggttctgaagttttacagacaaagggatgtgcaggtcattgctttttattttatacaatgactagactacatatgatgccttgaaattcaggtatagttgctgttttattagctgttattatctttctatatgcaaacatccaaatttgtgaagagttcattttgacaagcacaagtttagaagaaatttgtgacctgtatgagtaaacactaattcaattgttgtttgcctaatataataacatgtccaaaatgaaaactatctggtaattctctatgatggaatttgtaaatcatagtagtttaagtgacatttttggtatatgctgtttattattttgacagtttctcttggtagctcagaagtgaatgccttaagcaaattaaaactgagttaaaaattgaaaataaattcagaagtaagactcagtgttagacaaatgtgtttaacagagctaccactattgagttaagaatctgtagcctgtcatgagaaaaatcaaggataaatatttgtatacatttttaaaatactgaattcttgcaaaactttttttagccttctgaaaattgaattacttttggctatcatatcatcatattttcctcaagcttcttagttttaaaatatttggcaatgtattgttctgaggttggttttctaagattctctttttaaattcttgtgtgagtctgaaaaggctgcctggctttctgggtactgaagaggtctgcttttagatggaaaacatggctttgagttgcacctttgaatttgtgtttcccaagggctaaaaacctgaactgaacaaacagacttttagacttgactcattcctgaattgtggattgttaggaaattcagaaatatcacctaaaagtactagtaatgacattaacttaaattgttggttgaattttatgcattctccctataaaattaggtttaataataacatattcaaaattcaggtataattttcagttttaggcaatttatactcttgaagctttgaaggagtaaatcattttgttttgtcagattaatttttcagctatatcggaaaactaaatgatgtggttatttataaaagcttcttgaaggagatgcatggcaagtcgttgtaaggtgaagtatctagtagtagtaatcacagccatttagaggttatttgtgtgttgtaaagatagtaatcacaacagcatatatttaaattactctatttaatacaaacaacaatcatatgtctgggtacattgcttcaacaacaagggtaattttaaacaaaattacatatactaacagctttctctgttccgtttgctaccacctaatctgagctcttatcataacaattggatctcgttttctttccatcactgctccttttcccaggcccatttccatcagtcattacaaatctgaatgttcactcaattctagctactgtgtaaaatccccgaggataaggtgggaacaaataaggatgagagctagttgtgagtttgggtgggcttgtgtgtgcttgcaaatccagaattggggagagtgaggcacgggtattggattgtgtgtttgagacaagcttgagctgcacaggaagactgaaaaaaatgacagcagtaaaaaccacaaaaagaaccagagagagatatgggtagagatttatctataggcagagaggtggaagacagacttttagtcctgagcacattgagtttccagtatagcaaggaaggcaataaggaataattgtaatctgataattacaaaagggagaggtcagcaaccatgcgtcacttactataagagaacaataaccttagctaagagcagaaaggatgaatgggagatggccaactaaagatgaaagagcagtgatgtagaataaggcctattaagtctagcaaagaggccagggaaaggccaaggctgacaaacaagctcaagatttaaccaggagtgttatactaatccatacggtttactaaagtcttcaaaatgagatcgaggtttcagagtatggaatcttaatcatatggcttaaatgctaattaaaaatgctaatgcaaaatagaaaaataattctccatatcattattgtgggggtttaaatgaagcaacatatataaggctcttaccattatacctagattgaataaacactcagtagagggttgctgttacatacatagaaaagaccaagcttgctaattattgtgtctttgagtctttcctcagtcagttctgaatatcatagaatatcatctgaattgctaaaacctgtaaactctgaaaatggccttttataatttggctgtaaaacttggcctacttaaatctgcatgtagatggtatttttcctgtttggtagaacatccttgttttattgctgaacttgaatgcaattcagtatgctactgtgggtctttctgggtatattttgttatttgttgtacatggaaccatgtttctcaaaacttgaattatttggaattccaaaacagacctggttccaaaattccaaagaagactggatccacgccatgcaaatttagcttttttaaaatcatcacctctccaatatccttctgtgaatcaggaagtccttaggacccctcagggttgctaaatgttttgtagattaccgcttgtggttttcaagagtaactctaatctgaccagagtcacatcttgaaaatgtaatgcccttcctcttgaaccttttgtttcctaaggccactcctcccaagtcccctgaagcacagagtgctccctcttgtgtctgacttccttccctttcccccctttcatgactattcctacccagggattagtgtgtgagtcttagcagagtttctcacccacttcagaaatggttaaaccatttcttcctcttatacttaaattctttttgtccttaaaagaatttatccaccaaatatttgaataggtattaggtgccaatggttgttcaaagtgttaatgattagaaagctaagcagactctcaaaatctctgctgggagggaaattgtttgctagtaagtagaatgcaacatgtaaattgtgagcaagttcttacagatagcacacaatgctgtcttgattttagaggacaatgtggtagggaaggaaaagctgcataccttagagcatagtatttcgttattgtcttgtttttatgtggttagttatctaacttctggttagactgcacatgtcttaagggaggagtcatgtcttatacttctatataccgtacaatactggttgtttaataatgggtaactgcttaatgtttgctcaattcattcatccattggttaacagagcaggtaaaattttatttattaaacattgctccccatttggccaacacatcgatccaagtgtaatctaatgtactaattactgctttgaaagattggaatatctgtatttatgtaaggctagatttttctagtcttgttttttgttaaattcatagttcatgaaggaaaacccttcaggttgaattcttcctcctatctcagatttagtacatagcaaacaaatgtaatttctgtgcttgcagaagcagctcttcctataaaaagcttgattattcctgcaattgtttttgcttaatttagacattaagtggctttcactaattcattattaggagcttttgttgaacacctaagtgaccagcatacatttcctgaggtgcttattcaatggaagagactgttggattcccatactatagttattgccttaatggtcaagtttggtacatttcatttcacattgagctcatatcttgttaggacagacgaacaatactaatttaatacagtaccagtattttgcttcatgaagaaaactgaagctctggactttgatgttatatttgatctcctatatataaatattttattcttctacaacgaaagaacagcttgaggagcagatcccagaaggatttttttttgtcagaacaatgacagaaagaatttttatttgtagtagtaaaaattctggcagcttaaagtttgaatcttcaacttgacaatatttctgagatggcatgcttactgtaacaaatatagaaacatattttctacttaaatgaagaaatggatggttatagacattagccaccaaagtagggaagatatttggagcttaatgtcaataagttcatcttctcttctgttagggttttgacctttgaaagcagggccatgcctctttaaattttcagtgcttagcatgctgccagttcgcctagcatctattcataaatgctaattgtgatggaggacaatattgccaaacatgatgtgttctgttggaaaatgacccttatgttagaatgtagaagaaagaataattgagggtaattttaaatacaggcagtaaatatttccatgatgttgaaagctaaaatttattctcctgtcatcctagaagcaaacatctacgttgagtttgcttctaaaaatcagattatagataattttctccgtgaaataaatagatcagagagatactaaactaacacaatctccatgaaggatttcagtgattgctcagaaggttgattttgattactaggtattcaaatgacctggaattattttgattggttttgctagctttgaaagttcagagtatagaatcttaaaagttggaaggcagaactacttccttctatgacggctaccaatttggatagataggaattaggcagacacgccttgtagaggaatccaaccctgccgggtggattttggctctcttgctccccttcctcaaggtctctctaacttggaattatgttcagtctgtaccaaggtactcctttatctgaactcccacggcatttcccctttcccattttttttttgtgattgttctttcaatcctctgatcactaactaactagaacctatatagtagatgttcaaatatttgttatattgatttgaatgtgtctttctgtgttccattgccctggcccttttggagagcaagatacttaaagctgggtgaataattgaccattcatctttgttgtaatggccagcttattgattttctttaaaagagaaaaaagttgtcaaatacagtgattgagtttttgagttgacgatgagacttttgaattgcatccaatttagttgtccaatttctgtggtgctagactaattgcacaatgtttataaagcattgtatttccatgtaacattatccatgagagagttgactctttacattttgctgcttttgttaatttctgcctgattgagaaaattaaaacttaattttcttgcaataatgatcttttgtatggcaatcagaacttcaacattagagtttataagtaagttcaccatttcttgtattcttaaagggttgagactctagagcaatacttttataattagataatactataaaatactgcactgttatatttaatatagctcatcataaatgaagtttaataaactctgattgcttgactaatgcgtactttgattgcttcttcagagttgaatttaatgaaaatatatggtcactatacttattgatgtaatatgtactgtaatgaccattatcattagatttgcataataaaaccttaccaaaatgactttaatcagtgcttttaattcaagactgtgattccatttttggggggtcacttttttctttcgttttttttaattttttaattctatgtatatgtatagatctatactttgtacaaagaagtaagatacatctttacctccatggcctgtgggaaagatatttcagtctatataaagtaaattcagaaatgatttgagaactttttcttaaaaaccacttagaaatgaagtgtttgtctatttattttaaaataatgtttttctgtgctgagggcctaactcatagtctctcatacatattcggtgaatgctcaaccactgtattatactgcagacaggctttctttgtgtatcccttgctgtcctagaactcttgctatgcacatccggctggactcaacctcaagagattcacctgcttctgcctccagaatgctgggattagaggtgtgcaccaccatggttggttgtatgaaggtgtactttaatacaataattttaaaatgtgtttttaatatcagttaatatgtggaccagaaggtagagagcacagggtaggctcgctctcacatcttttctggagagggatgccacggtggttcttgactattatctgtgtaatttgttccaaaataaaacagctatttatcgtttatcttgggtctagtgaactcattaataccctaccttcactgattatataatattcttacaaaaaagagaaagatcagttcatatgaacatgattgctttaaacttgccccaaaacagctctttacagttctttgaacttcctgtttggtgtcgttttttgactgatgttcagtcatgtggcagaaatcatttattttctattgatgaccatttgtgacttatactatgatttcagcacattttcgtatacagtgatgaaaaatcacaatttctgaaactcaggtactttgtgtctgctaaacattttcctctttagcataccatggttatttccctcacacaatttaacggaaagttttaaatattattatatttaggaaatatgccacttgtcaagtcaaaattataactactttttattttttttatgtgcatatgcatgtatatgtttgtgtgattgtctgatgtgtgtgtgcaggtgtctgcaggatcagaaaaggtgttggctcttctgtagctggagttataggagaacctcctgatgtgggtgctgggtaccaaacttggatcttctacaagagtagtatgtgttattaactgctgagccttttttctagctcttgaaagcaaatattttagaaaataaccatgttacagtaaatgcgcccatttatatagaatgtatttgtgtagtggaataaaatttataaatcaagaaatcaagagcagagtgttttttctttatggctctctatcataagtaattgagataattttttaagtgtatctaatttgctttctcccttggggtgctctatcattcttgaaaatacgtattagggagaaattcttcaagaataaaatagagcagagtcgttatccagttttattttaccagggttccacatttggtttgccagtagtcaaaatttaaatttaagaggcacctagaaatagaaatagaaatttagaaatgtccttctaaaatgaatattccaggtcaatggatgtgcaaaagtacaaacaggacatcataggaatgcactacacaaaagatttcagtttttgtattatgtagtacaggggtcagaagggaagaagtagaaggtggcctggggccaagtcattcagagcttgaatgcctttgggttattagtccttacagtagcatgaggcattaaatatttataaaatggaatatgagagtcattcataatcatattgagccttagtgtaccaagtattgttttaggcatcagaaacagagccccaaactagacagagaagaaatcatgtccttatacagctcatattatagtgagcagaagagatactaaatggttggggctgtaagctcagtggaaaaacgattgcttagcatgtacaaagccatgggttacatccccagcactagagaaaacaaagcaaaagccaacagaaaatgaataacaatatattgtagattggtatattagattttatttgaagaatgaaaaaaaaacacaagggaatgtggggattaggcccatattattcctataacagtattaccagagtaggcctcactgagaaaaaaatcattgctaggaggattaaggagcaagttttacagataacagaaatgaatgttgcaggcagagggaagagtgaattcctgtgggtgattgcttttcttgggagcagtgaggtggttagtgtgaatgaagctagttgaatgaaggggaagcagtaagaaatgaggtcatgggtcttgtagtcatcgtaatgactctgaattgcattggaaaggaaaatagagtcattgcaggtttgaacttaggagtgacatgactttggttttcacagtataatgttgtctgcccttttcaaaactcactgtaagagagcaaagctagaataagggagacaagataggcggttactaaggaaatctgggtaagaactgatggtggcttgaagtagacttttagtgtgtgtgtgtgtgtgtgtgtgtgtgtgtgtgtgtgtgtgtactgaacagttattctttagggcattggaaatgaagaatgatgatatgtggaggtctttaacatagaccaatggaatacagtggtaccattaacacaaatggtacactcttatttgtaaaattagttcttttgcttggattatcttaaattccacccaactttaactgtccatagtatgtggtttattgtgaacaaaaagaatatcaactcaaaatcagagaattgtcagaagattccagattcttcctgtcaaaccaaatgaaaagatagctagcatttcaatttttcttgtgtttgtctccactgattaaattgtcaacatgtgttcaattgagatacagatctgaagcatttctggcatatatgtaccttaacttagggaatttgactaaagcaaatcatttttcttctaatttatattcttcctttggagatatagaagtttccaatcataactttataaccccaatggaatggaagaaaaggaaagcagaagttgtttaaggagttatgtaatctatctcagaaacccagatggacaggctcatgtcagatgttagcagggtcacttcaggtctgtaattgtgctttactaggaatcaactttatcaccatgcatgaaggttttctgtaacccaccataaaaactcaaaacgaaatggtttgtgcataaacttctaaggtgaattaatcttttagagattgatttagttttgatataatctccatttttatcttttgtgcttatggatgatgcattcgtgtgggcgcctgtgtctgtgtgggcacatacatgtgtgtatgtttgtggacacatgcatgtgtctatgtgtgtgtatctgtgtgtatacatgcattctagagcatgttatggatgaagggaggtcagagaacatatatttgggtatttctgggcccacacctctttatcttgtttgctgcatggttagttggcctactagttatcacgggttctcctgtcactgcctgtcattttatcgttagagtactgggataatagatgcaaaggactgcaaagtggctttcaaacttaggttttcacatttgtttagtgagcgcttggcatactaagctatcttccaaccccctcttttcttttttcaaggcaataaagactggttgtggtttatgatgatttagtacagggattagaagtttaaactcctgacagaatcaaagaattcaacatacaaaaaaaaaattctacgcatgcactnnnnnnnnnnnnnnnnnnnnnnnnnatttgccacagctgttctggggaaaggttatctttaatagcacagagaggataataaaaattgtaggcaatttcctgagatttttgagaccaagcagttttgacttattgaaaactcacaatgaaattctctgcagtgaaagcactgtattttacttagtaaaaatacatgccaacatccatgaccatgtaaaatatactttattcagcttcttctgtaagaaacaagattatgaaacaagtcagaaggactaaattcaatttctaaccattgtggatcggttctttcctctctctctcactctctctctctctatatatatatatatgtatgtatatatatattaattattttatatattaattaatatacatatattaattaaaggacatttcaatgtactgtcatgtgctatatgaggagtctgagccagagatgggactgtacatatgatggtgatcctgtaatagtatatcatctaatgacattcttgtttgcttaagtttgctctttgatgtttacttaacgatgaagtcacttactgtgcatttctagaaacatgtcatcatcatgaagtgatatgtggctgtacttatgtagtgagatctaaaattcatactgactgtatgccattgtaagattttgaaaaaccttttgaatgctgaattttattgaactgttagtctttgttatattttaatattttactctaatggtggctatatgtgacattgttactgtttttttgtcttcatttaatcacctataagaaaatattcactgccaaacctgttcaaagactgtcaagaaacataatttcactgagtcatctgtcatcttgagcatggttgtagttttctctgagccagacgtgaaagggtgaatcttaacattcatatttaaaaacaaatagattactttcccccaatccaaacttcatttgtaattcctacattttaaaaaaaatttgtaatggttgtattatttgaatgttgaattttgtaactttttgggcaatgtacattttgtaaaagatgagaagcatttaatttcttcagtcattgttgttttgtttgatctatgaatttcatttatctgactgttatttcttttgtttgtttccttttggttttaatagaacattcaaataaaaactttggcagatgatgtggtaaggtggagtgagcagcatgttattgtattgcttatgcacgttacattttcacttaaaaatggacattaaagcattgatatatgcagcatataaagtgactggatgtttagaaaatagaacagaataggataattgccaatagagcaatttctcccttttcacacattaacataaacagttgttgtcaggcacagtggtgcatacctgtaattctagcactccaaaggctgaaggaggattattgcaagttggaggtcagcctggtgtccataaggagttctaggtcagctagggctaagtagtgtctcaccattcctcaataaaatgaaacaactgccctaaacttacataaacagctgggtcatatcccagatcaattatttctttatctttgtaacatataccaaagcaatattttaaagttttgtgcataaaggtggacgctggaaaacctggacattttctcttttgatagccaaataaattgtggatatattaaataccaatattggaggaaattgtttacaattcaaaaataaattaagtttattatcttagatatgtgcttattgaattttaaaagcttatatatattttcaagctcagactacaatagtaattcttactaaaagttgtaagcaaatatttaaatgtactctttttacttaaactttcttgaataatattttaaacagtttcatttttttgtctgtttgaagttacctatcaacaaaagatgtaaaataatgttactgctctaaggagatgaaagtatacaacttgacttcatcttcttacccaaatacagctgaaagacaaaggcagtttttgcattaaagtgaagggcacagaaatagcaaatctatatgttagtaatgctgatattcagtacagaagcttagactgtataagtattcttcagtgatatgaagtgagtggctaactgcatatttaaatgctttcatgtccaccatctctttccgtaaaatttgactcagtttatttgggattactaaaattgtttttcttgagttgtgggaaggaagacactacctatgtaaaccaacttaactgccctcaaagacatacagtaaaacccaataatacagttcaaataattttaaagaaagaattgtaatgtgaaagctgagatcagaaccatggtctcttgtgtttgagtcacctgttctgtgaattgaggaagtaggtttagatgctatttcatttttcttcccacctccaaactattgtggtttctataatctctctgtaagcaaccacatactcaaataatttttgtaatcctaactaagctgcttaaaactgctgtttttcaaagtacacgttatggttttacaaaaaacattgtatctatcaataaaatgaagaatatgtactcttagggggggtcaacaaaattttccataaactgtagtgatgtctgtaatgtttttgtattcttaaaggttacttaaatgaagtgtggtcatgtggcagtgttcctccactgtcctcatagctaacatgtctgcttgcttaatgtgacttgatattgcatgtgcttcctaacagacaccagaataaaactgagttgccttcagttttatgaatattactaatgtttgatgtcagatatttgatggcttttaaaccaaatatcctcttgacttgcaagcaaagtccttgacttacttgatacgaaagagcaagctaattgttagagattgtacatggtatcagtggtttaaaggaaatacccacacatcagaatagtatttggaggaggaaggtatttctgttttcgtttccaacaaatgcagaaacagccaccacaaaattttgatccaaagtgtctcttcacttccttccttgtaaaacagaaatgacaagtgactaaattttacttttgaggcatgttttttctcccccagctttctgaagcttaggaatgacttcagggttgcaaaaacagtccaatctctaactggagcttgctgcttacaataatgttttgtcaaaagagaataacaatagataacatactaagtgccattttgatgcttccattcttaatgtgcctggctcctgatctttttctgagggctttttatttttctgtttgtagcgtgatcgaattacaagtttcagaaaatctactgtcaaaaaagaaaaaccttttattcaacatcctattgattctcaagtctcgatgagtgagtttccagtggctcagccattatatgatgaacgatctctgaatttgtctgaaaaggaagttctggacctttttgagaaaatgatggtgagttcgacctctaatttcattgtcattttaaactgtgtatgtctagaatagattttaaatagggatgtttgtagttgactgtttatgtcatataaaagacagatccaactcttgttaaaaaaacaaaagtatttccaagagtacctggatttgtttgtttatttatttgctagaatgcctatctgttctagtcagagtgcctaaaatcagacacgggtttattcctctttgtcttgtagtattttgtggtttgtggcacaccaaatcaatttttcaattaaataatctgtgtgtttgctggtccaaagcaacatgtgtccaagtctacatgatctgttgagtagatgaaatatagttgggaaggcagagtgtaaaataaacaacaaaatggtaattggagccaaggaattaattcattctattttctcatatcagcaagagtcatacaacttacagtttgtagggtgtttcttaattttttctttgtgtgtgtgtcctctattatttctaaaataataaatgtaatacttggattattcaatactttatgtctggagcagggataaatgaagtattgggctatctcacattggttagcttgaccagatctcttttagagataccaaacattctcatctcccacatcaacatacattttatataaagactacaataacatttgtagcatcccttcctttgtcaaacaaaccctagtctatcttgtattattaatatttctcagtcactcaattgttcctgtttccgattccagtgtcccgtcttaattaccagaaatgttagaacccttctggtatttctctgcttaattgatgaaataaaatagaaggatgagaatgaaattttcttgggcctctactaccacatgtaccttgcttttagactctggactaattgctttgcttcttgttaccatggatgaaattttcatgtccaattctttattattattattattattattattattattattattatttgctgtatctggtttgcaatagaattcctccatagggaatgggctcccaaagaccatttgtgctctagggttaaagactagctccagtgttagaggtcccatagactgtcttggcctcctagctggcacccacattcagagggtttggcttggtccagtgctgtctccccacctttatgactagggtctccatgctttcactaggtcaggtcaactgtttctgcgagtttctgcagcaacgtcttggctcctttcatgtccgattcttatatgtgtgtatacatggagttgccattctttttttacctacttagatctttccccccttccattttattcggtgtatagctactgttttgcctggagtcattgtgtatgcctgtaatttcaatgctctggaggctgagggaggaggatcatggttaaaaaactagcatgcaattcatagagatattgtatctcaatccgttttaaaaaatagttctattcctactactttcctccaagttgcacacatgccttttatgggcttgaaacactatacaatagtgattcttaataatttgtaacttgtgagcactatatgaactattttataacctttcataatcatgttttatcatttaatgttaattctaatatttactacaatattatatatttttaaaaaatttaaatgtgtgaccttttgtagaacaatttgcttgttggattcattaattttatttaagcaaatgtataagttagtactacattttccctagtggaattgtttcattccatagagctttggaggaagatattaaacaaaaatatatttcataggaaatataatattgtgttattatttaatttgttgtatatcatatatatcattttcacctacataaaagtattatatacttgtatatcgacaatactgtttttatatccaatggtgtgattacttggttattcgatttactagtttgatgatgacgatattattttctatgacaatgataatnnnnnnnnnnnnnnnnnnnnnnnnnnnnnnnnnnnnnnnnnnnnnnnnnnnnnnnnnnnnnnnnnnnnnnnnnnnnnnnnnnnnnnnnnnnnnnnnnnnnnnnnnnnnnnnnnnntggtagttttataagatgtgaaaaacttacagtcagtaaatgtaagtaaatctattcagagagtacatatatttatagtgaatatgttataaacatttgtagcattttttcctttatctgataaactctgatcattgttcagttgccaacatttcttaacattttactactttgtcacactgtcttgatcactgataacagaaaaacagaaacactgatatatgtgtgaatatcatttataaataaacacactactttaaaataatagtataaatgcatcaggaatagcttttgtgagaaacatcgtttgattgaaagttaacaaccaagataaatgggaaactttgaaaggattatatctattctttgagaaaagttttcttaccccttgtttgtattctatgtttaatttaccaatattgccttccaatgaacatgttcttttcagaatcggcgttgtttatgtttactataagttcattgcccaatcatgaaactattttacatgtattatgccattttattcttatgactgttcttctaagtgtgtactaattgtttgatctcatttccaaataaggagattgagcttcagagagagagagagagagagagagagagagagagagagagagagagagactaagaaagttggttcagtaacttaaagctattaagtgggcatactgatacacacacttaggtacacaataaatctaaaacattggaattttggtgacatctatatttaccatttcattaaagctatatatcaaatcagtacgttttggtgtataaatattgaggagatgcataaggtacgagagaaagggtctgagatgtagcattttctgcagatgacagatccttatttgcagttgccctttatagaacctcaccaaaggccaacagccttataatagaaagctgttgaagtatcttcatcatagttgataaagagaaggcactgaagttactatttctgaaacacagaagtaggctttgagatatgaaatttctgtgatttcttcactacctgtgggtggcctccttacaaataatgtaaacaaaaatgttcttgtcttatttgatgattactaaaatgatctggttagtgtctcttgatgttccctttattctattgtttctcttagtgaatgtttgcagtttccagaactaccatggaactgtgtcaccatagtataaaagatgtgtttggatatttttgatgacatactgaaacggcatcaaatagcacctttcacacactttttttttttttttttttttttttttttttttttttttttggtttttcgaggcaggctttctctgtattgctttggagcctgtcctggatcatgctctgtagacccggctggcttttcctgcctctgcctccagagtgctgggattaaagtcgtgtaccaccaatgcctggtttagtttacaatttctaatgcaatggattatttaacttttttttaaagaaatagaatgttttcataaaatttatggggaaaacaataaaaagcaatattcaaatttattctacctcattctgataattgatagttttagtgcttgagtatcaaaagtaccaatagcatttctcattgtagcagttattagaagactaagtttaaaattacagcagaatagaactttcaaaataggtattagctattttattattaatcattccctaatactccccctaaaaccaccttgatttattttgaagttaatgaaaattcttaaatgagagggctatctggtatggcaatacatgactgtaattgtagcattcaggagtccaaggtaggtagatctcgggatatataggaaattatatgtcagccaacagggtacatactaagattcttccttgtctcaaaacagggtaagtgactcacttttactttgaatgttttcttgactctcacatttactctgtgcatccataaatcccttttcatattatagatatttgcatatttgatgtagcaaacataagaccatcttaataataataccactgtctgttgctgacagatttaaagatctcacatgttatacttttcggtaattctttcataaagcaaacgctctttacaaacagtattttttgtattatatcgatgtactttgcatctttggcataatttaatgatgacatagttacatgtaataagtgcttaattattggtgtttttatttcacctgttagaattctcacaggtaaatctaaatcttttaatcttgttcttttccttttctccttcattaatttacaccgaagagttgcctctggacaccaggtgctctactttaacccaagcgtattgcattcccttgattgctgttaaaggatatttttttctcactcagcaccagggttttagaagttggttagcttggctgagaacctttgattgcgctcagcgtaagtaattttaataacagttaagtttccataaaatacattattggtaaactaggccttcacatctacaaaaagccatggaatagtgtcggaaatgattagattctaagaaattgttcagacagcccaattgccaccagttacatttaaatttcctacattctttcccccatattttagaccgtgctccacattttattttcctgtgaagaattgtgtggaaaacatgtaaaggagtagtggcatgtactcagaaaacagatgtcaaaactaatctggatctggatcagtttaatttttgccattattagtatcacaaaaggttcctgagggaaagagaaggaagacaggtattgaaggagaaaaaattaaagaactaggtttgcaaattgatgttgtagtgggacaaattcaggaaccactgcttttttttttttttcttggcctgcatttggaaatgccttgaaaataagtacctttataaaaaagggatttttttgtgtattctttatgaatacattttagcaattatgagttgatctgtgttatgatatagatggtatgctatgggctgcaggtttagaaataaatgtagcacctacttttatccacagagagcggagttcagtcacatagacaggtagctatggcgtccctaaaattgaggctagctgtggatcagctgctttagtgggagatataatatagtcctttcagcctctcatgggggctcaggaaagaagcagatgtagaggtaaggaaagtgtgaaaagccagtgtcaaattctgaattttcagtctttgtttttctggcatcagtgccttctcattgtttgaggaattcatcaaagttcaagagttcacttgacactagtgtgtgtgtgtgtgtgtgtgtgtgtgtgtgtgtgtgtgtgttgtgtgagtgcaggtaggaatgcacacattctgcagtgtgtatgaggaggaggttagatgacaacttgtaagatttgattttcttcttccacctactataggttctccagggcccaactcaggtcaccagacttgtaaggccagtgcctttccctgcaaagccacttcactggctccatgctttatgttttaaatggttaaggagaagagtgtttgaaggtgcatggaaattacatgaatttcattgtctacagaggagattttttttgtggaatgcagctatgtctatttttaaattcctattttgtgtctttgtactgtagcaaaaattaattctggtttaggctttcctggcctatatagagaattcaaggctaatctgggatacgtaggccctgcctcaaaaacttaaaccaaaccagagcaaactgaaacaaaataaaaaaataaaaccatgcccagaaaagaataaaaagaaagcagagactattaatgaggaaagtctaaaacacttattaccctgcactgacatactacagaaaagcattgtaacctcaggaatgattcggtggtctttatgctttttgatttttcttccccatttgggaatagtatatatataaataaatgtatgtgtatgaattcatttgtatatatgtatacatttttctgcatgtaacctcaaactgtctcattttcaactatgaatatatgcatatgctaatgttatgtaccttataaggtgaaggcatattcaagattgtgaaaaccttgaaggaatgagattgtccaatgaatatattttttcagacaaaagtcttcactttcatgatggtttttattgtgtgctgacagtgagcccatgttttttatgtcttgttttaaaataggcagcaattagacatctttattttgatatttggcactcaaagccaaaagctgacaaagaagcccaagttcagggctgaatagatggcacagtgtgcttttcccgaggacttggtttcaattcctagcacatacttgatggtttccaaccatttgtgactcctgtctcaagggatctaacatctgcttctgatatttgaaggcaccaggcacacacacatggtacacagacatacatgcatcaaaacacatttaaaaatacataaaacaaaatgctggtccaaatgcatcaagtagatagttagcaaaaactaaatcagaacattgacttaccaatccattccattaatcaagcttcaccaggacaagtaaattcccttcccctttggtgacaaccagttgtgcaatgagtatggcatgttatatattaaagtttctacattaatgggttcaaatgttctttagtgagagagtctttaattaatgctattagagaatagactctttccattttcacttccgtgtcattcatatatagatccttatcctcatgagtgtctcctccagacagtatctagccctgagaagaaagaattaacagtgattccagcagaagactgatatggaagttgggtcagccaatatgtgtcaatcaacatgaagttctttgaaaagaagttactttctaactgggcactattttgttaaattaaaagagaaatgcctaaatcatggtttaaaataatggtgcaataaccagagatgtgtttgtagggagaaaatatattctttctttttaaaatgtattttgaagtattcatgcaagtacagattgtatgtttagcatttaccctccctactttcataccttccctttttttcaatttttttaaagattttatttatttattatgtacacaacattctgcttccggtagaagagggcaccagatctcataacggatggttgtgagccaccatgtggttgctgggaattgaactcaggtcctctggaagagcagtcagtgctcctaacctctgagctatctctccagcccccataccttctcttttatcaacactcccagcttatactagtccttttgttccccatgacagtttcaagtctattttcatgtcatgcacatataggattttacacatttatataaactttcagaaccacaagtgaggggaaacatatgttggtcattctgacattagcttacattatttactatgattggggagaaatattttcataattatgtaaatattttactgtatttgtttcactctatctaaaatagtttatagttgtttcaacacacacacacacacacacacacacacacacaaaactagttggaactcatcatgtacccgaagctggccttgaacttgtggtcctccttgtagctccttgagtgcatgatttataggtgtgagatattacccttgctggcttgatttttttttttaaattttgtctttttctgtaaataaaagctgacttatttatttgtatagcagtctgtacactttggtttaaaatactgtttgagttgctggtcgttggtggcacacgcctttaatcccagcactggggaggcagaggcaggcggatctctgtgagttcgaggccagcctggtctccagagcgagtgccaggataggctccaaaactacacagagaaactctgtctcaaaaaaccaaaaataaaataaaataaaatactgtttgaattttccacatgtaagtgtgttcaggaatcctcgccccctccctctctctctctctctctctctctctctctgtgtgtgtgtgtgtgtgtgtgtgtgttgtttgttcctgaaagcatcttcttaactacagcttttattttgtcaatatatttttcatgttaaattgttctgttagtgactccaagaaaaatgatgtgtgtgtgtattgaaacaactataaactattttagtatgagctattttacaaaatatctgtattcatccagctttatagtgaaccacccacacttgagtcactttcctaatacctgctttagcactttttttttttgcttttgcaatgatttctgtgtgtcttgtgacagtatttgatgacaaggaaggcatttgagtttttgttttgcatttattatttcagctgcttttaccaagtgttttcaagcttctgtggggccttttgtttcttgctattaagaaaattcaaaagaggcacataaacatgtgccattaagtttatacactatcagtcaggtacaggattgagatcatgtgattctaattattgctgagaaaattgaagacgctgtcttcatgctctggctgctaagatttaaatggtttgttaatttgaggtggaatttaactaccattgcctaagactttaaagtataatatgcacttaaagtgagagtcatcatcatgattgataggtaactgtatttcaaatcattactttaatcatttatgtcttgaggagacagtttattagttagatttttgttatttttactatgtggtaatggataaaagatgaagaattacaaagaagacatctaacagtctcccattttcttgttcccttgcgctcgcattattggtattatcctattatcttcaatctgttgtctttataggaatcacttagagttgattttctattttctgagggcttatttggttaaaaggagacaaaataatcagtaaatatacctaacattaactgtagtgtgttgtagtacactgactgcaaataaatctgcattgtgaatatttcactgctcatttaaactacttagggtaccattcaacctatgggtccaaagaagaatctagtgtatattctctgttaggtattagtaaatcttattttctttaatcttttgaatgactgccatttttcaaccctcatgggtcctttatgtaatctgtctactctagaaataatggttgatgattgtactcacaattagcaattattagacagtgaaaactctagttatgttttcttatattaaaatacatgattttgggtggaggcctctgacaggaccttgaaaaaagaaatagacaggaagttgtgcatgaaacttagtaatattcacttaatattatgtatgcctttgtgtttagcctcattctatattcagaagtactatcttttcactgtgtccacttgactttgttttgctaccagagctcttatatgttatgtggctatagtctatatagtttaatagagttacccaaatcttttgaaaacttgaggcagttgataactgccaggtcaactggccactaattaaatgacataaaaaaaatctgattttcattttaatttaagaagtaaatatttgttcttgttttgttcagaaaagctagaattatggaatagaaaataaagttttgggtatagggatgtatacttgagaggttgaaggattatgagttctaggctagcctgagctacacaacaaaaccctgtgtcaataaaacagaagacaaccaaacttaaacttacctaccacccacacaaccaggaaaatcatttgtttaaataacattataaaattccactaattttgaaatgcaaaacatcaaaaataattaaatttattattgacacttgcatattttaggtactagagtgacattaattaattttccataaaggtctatatctctctagcctaagatttggaggcagagaaaagagaaaaccagagagggatgagaaagaaagaaagattaaatgaagtaatatttagctggtacaacttttaacctcatcttactctatttttatatagttccttctgtatctctgtagtcgttcagtgtttggggttatatatgtaggtcagtaatatagcattgctgtatatgtatgaggttctgagttcaagtcccagcaccaaaataaataaatgaaataaaagcaaaacaacaagaacaaacaatatttgaggtagtaaaggaatgtgtctagagagagacaggaaagagatgctgtggcttggttgctttgcttctctaatcttcagcttgaatcccaatatttgtctctaggtttttattatttgtgttgcaatttacaaatatggctttgctgaaaactattctatgtggtcaggtatttaaatgtcaacatcatttgtagcactacattcctcatatattgttgatacattaaacagacatgtaatatgcttaaaacttgctttctcttttgactatcaaaagaactgtgttcacaagtagtttcgtattcaattatgttgtctagagttaatattgagttacaagcattgctctatttagttttattattatattttaaagctagagttaatgatttggaagtatcagctgcacaattagtagtattttttatttctagaagaattaaatgagtcattatagactcttttgttcatatgaacgttacccattcctaaccaatgtaggcagccatttcataagtgaaaaatgctaataattctgaggcaatttcaatatttaaagaaaaggcccaaatatcaccccacctcaaaaaattttagtaagtgcttactgtattccagggaccaggatcttacctgggattgcagagctaagaaagttcctgccttcagttaccttagagttttatggtgatagttctctgacaaattgttaattataaataaaattagtatggaagaacaggatgaaggtttccattttgaaatggggcaatccagaaaatcttatggaaagcttagcggatgagtgtagtttaaagtataataactggccagcaagacacaaggaggtaggccctattgcaaaggatatgacagactctgaagaccctctatggaagacctcaccctccctggggagcagaaaaggtacgggatagatagggtgttactgaagggggcaggggaggaggggagggagagggacctgggattgacatgtaaaacaatcttgtttctaattcaaataaaaaaatggaaaaaaaaagaactggccagatgtagatttagctggaggcagcagctcacactgtgagaggtggcaaagggaacaacagtgggaagtttgagtcagcatagtatgtggaacaatcacggccgaccttgtattgaagcatagagggttaagccagaagaagttcccaaaatgacggtgaggaattgatagccgtagtggtagataccattctgtgggcactggttaatgtacaccaggcttgatatatatgatcatactcaattttgacaacattctctgaggtatataatcttacattcctcttactgccttgcctgttattctgacaacaccatttttgatggcctgaccactgcagtgcgtgccactaaaaatcaaatggaggtaccaatgtggagctatcactggaaggagagaggatactactactcttttaggatatgtggggatgtttacacatccagaaaattctgacagttgcacagttgattgtacttgggacatgtagattcgttgtaactacttttatttcagacagaaacgtcatcagaatgtttgaggcagtaaaaactccaacacttgtggagagaacataggaattttgatgaaaaccagagcaatatgaggctatggaatgatgtgcttagccaataaccctgtaaaattcaaggtcgaatgaatagatgtatattatttcaaggggaagaagaagcctcagaatatttgagagtggtagcgatagattctaagtgatgtcacatgaacataaattgaaactggtatatgtatattttagcccgagaaaatgcagacgtccaaaaacatttgcatggttcttaaattaattcccttcaaatcctgctaccatcctctttagtttgacaattaaagtattcacttgaaatgcttcagtatctcacatttttgaaaggaaaaatacatgatgtagatgtttaaaagtagactaagtattaagagatattagcttgctcttcaatcaggagtgttgcaacaatagactccagatggcattataggaattgcttgcagagccacatagtgaaatatagtctgattaaggagctgttgccactccagaaccaattggtctgtctaagtaaaaaatttgtggctgctgccatccgctccctatctacgtcatctctgttgccacccacaccagcaagatggatggcctgttcctggcctatttcttcacctagtttataaatgcatttcattggtgaagactaagccacatgtgtatattgaaattacatataaggatagcagacaaactccgtttttatggagtcatttttaaactgaaattgacaatgtgaggatgcatgaaaacgtagaaggcatgtctaaaccgtgttgggtagccaaaaatgacagatgaccactggaatctttcaactggtctcctggctgttagtcagatttttctcattcttcataactcaagtctaggctaaaatctttgctgaacttatttaccatctgtcttatattttcaaggaatctcatacatgtctccattataattccttgtacctattagatcatgaattagttatgtttctttagtcaacaacatatataacatttctaaggtccagccattgcttcacaaataatagcatttaatttgagtataaaaagttactcaacttttcagtgttaacagtctagcacagttccttatgtatactatatgttgaataaataagtgattctaattttaaaagaagacataaaaagtcaatgtcttttgactttaatagtttttaaaattttcctgaatgtattttgtatctatttctataaggaaaacattagcaaaccttaaactgcacacaaatgggtaagttatgagtgagttttctgacagctacaatagaaggaggggaatattttataagagtaaatggtttgtaggaacaggtgtagagataagaagtggcagagggggagtaacatgatcaaagtatgtttcatacatgtgtgaagcttcataatgaagcatgtatatggttgataatttaaaacagagtttttcctgtttctcatacatacatacatacatacatacatacatacatacatacatgaatgcagagagagagagagagagagagagagagagagagagagagatttcctcttttttctgtttcatatacaacaactttctgagaatttttctttggcgatgtatctcctgataaatttgtctatcacatatgttttcttgggtaacagtggtccttgggaaacatggaccaaagagtagtgcacgagtgtgtgtgtgtgtgtgtgtgtgtgtgtgtgtgtgtgtgtatttgctgtagagataagtgaatggtttttctaggactgtataatgtacatctatgttatgaaccaccaaagtattccatagcatagtttaaaatttttctttagttttcttcttctcacagttcagctagggagaagtataaatcatgaatacatgtgaaatacacacaacattatggtatctcaagtagtaaataataacccaaaatatgtctgttgttaaatattaattgcattaatcacttttgtgatgcttacacaacaatccatccattctcacagtagatgttctttctaataggaggatatgaacctgaatgaagaaaagaaggctcctttacgaaacaaggattttaccaccaagcgtgagatggttgtccagtatatttctgctactgccaaatctgtaagtagggacaattcccaggcaccaacagaatgagcttagctgtttgcttaaaggttaacaaacctcaactctttaaatttttgcctcagtgaattcatattgccaattaaggaaacgacatgtgtacacttttacatattttgcacatatatctcagtactgaactgtttattagacatgagagatccatgattataagcaagagaccagtatggaagtctcttgattgaattcagtgaatttgagggcagaggctttatgcagtcactaaaaatttccagtgttttgctggtattctacctactaaacagattgctacatgaaattttcagatttgagggagaaaacacaaacagcccagccacctttaatcaagtttacattgaagcatgtacttttaaacaatgtttttcatattttgctttgttgttttgagtgcaaactgtgtaagctgcctcataacctgtgtggtaaagctcaccttaatataaaggaaagcaaacaccaggaactttaatcaaatctgtatgaatttcaaaacctaaacgtttgtttcattgaaagaatttattgtcaacaagaaaaacttactcctttaatagaattgtttattttttcttgttacacttctaaagctctttgaaaagcaaccttcagatttgattttttgtaggaaattatatattattgatatgacaaaatatatctcttgtattcttgtaatgagctttatatgtctagatttcaaaaaatcactatgtgcatgtgtgtatatacatgcattcatatatatacatacaaaatttatatgtacgtatatgaatatattacatatctgtatttgtacacatgcatttaggacaaagtattttctgtttaaaacattatccactgaagaaaatgtccttaactgtaaaagtaaattccagcatcatttggtaatgtcattcatactttttagtatactaattccagtagcaactgaagaattttgtaattatattgcttcaatattgtactttaggcaagctaaatctgaatgctgaactatttaaacataatgcattgcagctctgccagagcagagcaacagcatgttttttaatttggttctggtatccaagggcagaaatatgtttcaagtgataagtgaaatttgccatgagcattatatatatatatatatatatatatatatataatattatatgagtataaagtagaaataatatatgactaatgatattgtgttttaatgatggaatttgttagcatctctggctcatttgtgggtgttgtttgggtaagtgggattatctataatgaagattatatgacattctcatgccttgtcctttggataattacacgttatctatgcacagcatttttaatttatgttcatatggtattctctttaacccaccaaataaatgtatccttgtaattcttatgctcattttcatattgaaatgaaaaccaattggctgaagctcttgcttagcaggaagtgcaccagcctaacctattaaggctctgaattccatctagcacagagacagattgggaggaggagatgcagaaaggtgggggaagggaagaggctagacaggagcttattttaactccttaattcaaatgatagatatggagtgtttctaacaagacatgaaattttccatttgaagtagccacaaaattagtactacttactgactggatggcccttatttctgtcatccagtgtgcttgttagctcttcttctttcacaggaattccaagattatagttgttgctattatttttcatgggccaaatatttcgatggaagagagcctgttgacaagtagtgttttgaagctttctcaccttggagagacattaattagtactgttttctgtcattaaaactatgaaaattgtttgtgtaatttccctttaaagataagaggaatgtcattcgatgaagaacaacattcaataggaaacagtgctttcacctgttcatcatcatgacagccaattttgcaccaattatcactgaatgtgtggctgttgcttgtgtggagcttaggttcctgcccttctgtctggctttcataaggtgttaaatatgctttgcctgtcttgtacattttttactcttttccattgtattcgtatattcattaaagatgtttcctcatttaatgcagatgtgatgatgcctatcatgtgataaaaagtctttgtaggtaatcaaagatctcatctgagagtagaaccagtgtcaaagtgcaaaaaacgttcaatagtcacaagtaagatacaggaggcctatagttgaattttaatgtaaaattgttttcccctttaatgaactgcattgttcttttatgtggaatttaaataatgataaagtgagctcattgaggaaagggcattaaaagatgatgaagcagcacacagatatgtgtcagaacctgtttctaaaacaaacaagtctggtgctgcatcattaatttttgctaaaattagtattggataagaggatattaaggaaactacaagttaatgttgtaaaactattgtttggtcatcccttcacacttattgtaaagttctataatagacacttgtgtatgctaaagtaatggtagattgaatatcccagtgatgagtgaactttaaataggtatgtgaagaacatagtgtgcttttattgctctgggagccaaatgcttgtattgtaggaggtaccgttctaggcttgacctaagagaattagccgatatgaattattttgttacaaataacaaagtagattgtatagtttcaaagtgccattgcagaactggaaaaaaagctgctggtattgttaaagctgccctactgattcataacccagaatgaggcacattatgctgctgatttagagaagatcttgcatactcctaacagagtatgtagacattcattaggaaatgttatccaccagagacctaatgttagtgcatcacacaccattatccttacgacaatatgaaaaaagcagtttatttctaattttaattataccttctgaaatttagattttaggacatgtcagattacacttttgacaatgtgtgagacattcagaggtgtaattattccccccaaaccctcaatagtacataatccaacatcattagatcagttgtgtctcaaatttgtagatttaaccaataaaacaagtagatgaaagctacggtgcacatgacaatatgtatgcacttattgtggctgtgttgttgccattttcagatactttttcctcaggtccttttcatacatgggatggataaggagaaacagttgagcccagataggaccaaacatttttctccttggttctcttaactaatcaatctaatatatttctctgtgtgctttagctaaatgaaatcattttgcaatctgatcaaatcattaaaacagaccttgaatgggcaacattttagttgtttcactgactacgaacctgcattaattgttaacacaggctctcattctttccttttggtctcacgtctgtgctaaggaaacaagggacaaatataaactctgtcttctttggtgggaggaaataatttaggtcaatagcatatctttcatttcagaggactgttagtcacaccaaagaagcttctattcatctaaattatcactgcttgtaaatagcgtgttatatgaatttttaaggaacttgcttcttcatttggaggctcggggattcctctgaaatcgtttacagccaccattatctttttgtatcttgtagtattttagtcagctgaggatacttacttggctttcaattaaatttgatgtttgttttaaagcactagctgaaaaatacaataggtattgataataactgttatcacatgaatcatgaattagctctctttgatacaatgcttaatattcaagtgtgagaatctgataacagtgattggacttatattttgatattggcataagaatatgtttatgttgagagttccctcttgttttcttaagcacagtcctgcctctcagaaattgcttcgtctcttgaaatttctgatctgtttcctccatattaatatgtgcatttttatggataaaatacattgttttcacatcatatagagaaccctgacttcatacttggaacagtatgatgacccagaaaaaaataataacaaatgtgtcttatcatttaaaagtataagtcaaaatgatattgtacattttaaatttgtaacaatataaaacattcagttttcaagtcaagttcatttcagaacttgatgcatgactttaaatgaaacatttgtcatttaaaataacttaccctgaccttaacactatttttaccatagctaggaaagaaaacgagagcaaaatttggaaaaagttcctactggtaatttcttttagtggctgtgagtagggaaattatctgagtgtatattggagttttattttatatttagattgtaatgcatggaaaacctattagagtgcagactttaaagaattctacaacatcatgataatttttctgtatgtgtaaactctatatttaaaatggcacacattaatattgctatcttgttttaagtttgttactagagtagactagtgactaatttactaaacaccttctttcaaagcttctgattactaatattattgctgtttgttttttttcacactgtaaccattctccgttgaccactgcatacagatagttggaagtaaagttacggtaagtacaaaagatatgttttacctttagtactaaatttgtgtttcagaaatttgtgattttttgcatgcagtaattaatgtttagtttttgtttgatgtatatttttccaaagtgttaaggcaaatattgacatctagtgattacaatttaggttggttatgtactttcttacagttttgtaatatattttagaactagaatatgccttggttttcttggagttttttcccccttggagaatcatgtctgtcattttagacaacatgggtgaaattgtgtggtgtatgtcagtttttcgggatcagagtgtttgtgtatgtgtgctggcattcctaaaatattggtcttctgtttacacaaattcttattttgatgtctgtctttggtttgggcatcattgatgtgtgtgtgtgtgtgtgtgtgtgtgtgtgtgtgtgtgtgnnnnnnnnnnnnnnnnnnnnnnnnnnnnnnnnntgtctgtgcacgtgtgttcatatcaactgatgctattcagttaggagtcctgaagatctggctttgtaggatgatatatattgactctgccatttggtgagtaatttttttccctgaacttcagatattaagtagataagttgaaatttcagcttatgttttaaggttcttgttggtgctacaatttaaagattgtatatttatggtattgtagttgtaatataacaagctggacattcctgggattgtatttcagagatgtttataatgactttgtctccttgagtatatgtcatttatttggagaatatagcatatgaagcatctttaaaaatcacagagaaatgatgaatttagtatagtcaatgtgtttactgtacctgtaaaagttccttacttattccctcctttcctcttcctccatgggagatgttatatgtggttaccaggaacatgttactatcctctttaaaatcttcaaatggctctcagtttccgggcgttggtggcacacgcctttaatcccagcactcgggaggcaaaggcaggcggatctctgtgagttcgaggccagcctggcctccagagcgagtgccaggatcggctccaaagccacagagaaaccctgtcttaaaaaaccaaaaaagactctgtttccctttataatctcatctctgattcattaaaatattgtatttacttgtgtgtgtacatgtatatatttcatggcatatgtatggacgtcagaggacaactccctcaagtcacttttctcattctgccatggggattttgctcaggttgccaggccactgagctatctctctgatcttaggcttccttttaaaaatgtcatctttagctgtgtccctgtgtttatcctgacaggtacccttgacgcttcctaaggatatttttttttcttgaatccttctaaatcaagcaagaaaagagaatactcttttcttctttggtggcccagcaagtacttctaagtatccatcttgattaactttcatgttgcagaaagaagctctcccatgtcagtctttccattccctgttgccctactaccatatttttaacattttagaataaagctcttccttgtctccttttgcaaatcaacacagctttttctttcaagaaactgagtctaaaggggaaaaagatagatgacaacagacaagtatatttaacagatagaggtccccaagaggctgtattgttatagcagatggagagactagcagctgtgcatggatcccagagggtgttcaaaggtgatgctttgagattaagttctatggatagatctagagtatgtcttctttcatggccattttttgcccatttgaactgtcaacttctgttgccaagaagtaaactatagtaatcccttctacaggaaatgaggaaggtttaatttaaagttgaaacaggaggtatgcattatggagatttgttttgtcctattttactttatttaatattttgcaactaaagagagagatgaaccaacaatatataaaatcacccgagttaaaagacagcttcaaagggcttatgtgtcataggctcattaatctccaaaaggtgggaggagtatatttgctggtaaaataggcaggtagaaatttcatagaggtgctatagacagtagaattctcatataacctatttaagtattgtgattacttagagattttaacattagtttaaaaatgagtgttggaaaagctggaatgaaattggaaaaatggaatatacaatgaagtaggtctgcatggccttttctcttttgtttctttaacactgattgcgagctgaaataatagcatttgaggccccgctgctgtttttttttaccattgctgttgcttttcattttttatatttataaagtttacttaaaaaacaaacctgaagctgcctattattgggatataactacaacctcatcctcaggtcatactgattctggctgtatgaatatcttgcccatattcactccacatcttttgcataaagcctgacttaattctgactccccagaccacctcccatttccactggatgccttactggaattcctgtagctctttcttttacacatgttgttcctttctatttgttgatttatatgactttacatattccccaagggctttttaaaaatgacattcctattttactttatagcaatttacatatttgaacagtaggtgctttcattgtttgggtttgtctttctgcgtccacaggacagattctatgttttatagaagtcatacatttataagaaaatgggtccagtttcagactctgttggtgcataaggcctgtatgatcttgagtaatttacagatcatatatgaacttcagacttcccattttgaaatgaaaatactaagttcaggataggtttcagtggactatttgtatttaatatactcaaactataatacttcagtcatatgtccagtttatcctttcattaattatgattgttatgtaaacatgttttgaaagtataaaacatagcaataactttttaaactaaaattaagatcatgaagtatttttttctaagcatacaagatatatgctgtttgtaggtttaaaggtatgggtgcaattatttcttggtcaagaatgatgggaaggctaggcagtggtgacacacaccttttatcccagcactcagaagacagaagcaggtggatctctgacagtttgaggctgccctggtctccagtgctagtttgaggacagccaggtattcacaacatagtgagaccctgtctcggaaaaaaatggtgggaaggatttttctgaaaattcaaaaaaaggctttatctctttattggaagctgtatgttatttggtgtgtattattgctaggctttgagaaaaatgcaaaacaacaccagcagcaacaacaaaaacaatagaaaccctcctatgtggtctcaagttaatactgacacattaattttaaagtcactaaaatagttgaagattttctatagattctgtctatgatgggaaaatgataaaatgtcttccattacctctctaaaagttgcagagaatttggggtcaaatagaggtagaactgggtagaactgaatgatgaatttgggggattctagttctaataaatgtggtagaactttgtgttttggtagaatatgttttattgtttaatcacacctcaaataaaacagatttagataattgacttgatttcctgcaagccaggaatcctttatccacacacataaaagtaagcattcttctaaaaaccacatgatcttctcactagatgctgaaaaatcctataacaaaatccaacaccccttcatgataaagatcttggagagaacaggaataacaggaacatatctaaacatgataaaagcaatatacaccaaaccagaagccaacatcaactgaatggagagaaactcaaagtgattcctctagaatcaggaacaagacaaggctgtccactctctccatatctcttcaatattgtacttgaagttctagtttgagcaatcagacaacaaaaggagatcaaaggtatacaaattggaaaggaagaagtcaaactttcagtatttgcagatgatatgctagtctacatatgtgacccaaaaaactctgccagggaactcctacagctgataaacaccttcagcaaagtagctggatacaaaattacctcaaaaaaatcagtagacatactttatacagatgataaatgcaatgagaaagaaatcagagaaacatcacccttcacaatatccacaaacaatataaaatatcttggggtaatgctaaccaaaaaagtaaaagacctgtgcagtaagaactttgagtctttaaagaaagaaattaaagaagataccagaaaatggaaagatctcccatgctcttggataggtagaatcaacatagtaaaaatggcaatcttgccaaaagtaatgtacagagtgaatgcaatccccatcaaaatcccaacacagttcttcacagactttgaaannnnnnnnnnnnnnnnnnnnnnnnnnnnnnnnnnnnnnnnnnnnnnnnnnnnnnnnnnnnnnnnnnnnnnnnnnnnnnnnnnnnnnnnnnnnnnnnnnnnnnnnnnnnnnnnnnnnnnnnnnnnnnnnnnnnnnnnnnnnnnnnnnnnnnnnnnnnnnnnnnnnnnnnnnnnnnnnnnnnnnnnnnnnnnnnnnnnnnnnnnnnnnnnnnnnnnnnnnnnnnnnnnnnnnnnnnnnnnnnnnnnnnnnnnnnnnnnnnnnnnnnnnnnnnnnnnnnnnnnnnnnnnnnnnnnnnnnnnnnnnnnnnnnnnnnnnnnnnnnnnnnnnnnnnnnnnnnnnnnnnnnnnnnnnnnnnnnnnnnnnnnnnnnnnnnnnnnnnnnnnnnnnnnnnnnnnnnnnnnnnnnnnnnnnnnnnnnnnnnnnnnnnnnnnnnnnnnnnnnnnnnnnnnnnnnnnnnnnnnnnnnnnnnnnnnnnnnnnnnnnnnnnnnnnnnnnnnnnnnnnnnnnnnnnnnnnnnnnnnnnnnnnnnnnnnnnnnnnnnnnnnnnnnnnnnnnnnnnnnnnnnnnnnnnnnnnnnnnnnnnnnnnnnnnnnnnnnnnnnnnnnnnnnnnnnnnnnnnnnnnnnnnnnnnnnnnnnnnnnnnnntttttgacaaagatgctaaatctatacaatggaagaaagatagcatcttcaacaaatggtgctggcacaacttgattcagacatggagaagattgcagatagatccatacctgtcaccaaacacaaaactgaagtgcaaatggatcaaagatctcaacataaatccggccacactgaatcttctagaagagaaagtgggagatacccttgatcgaattggcacaggagactgctttctgaacattacaccagtagcagacattgaaatctgcaattaataaatggaacctcctgaaactgagaagcttctgtaaggcaaaggacatggtcagtaagacaaaacaacagtccagagaatgggaaaacagcctctctaactgacagggggctgatttccaaaatatacattgaactcaagaaggtagccaccaaaacacaaaacacagnnnnnnnnnnnnnnnnnnnnnnnnnnnnnnnnnnnnnnnnnnnnnnnnnnnnnnnnnnnnnnnnnnnnnnnnnnnnnnnnnnnnnnnnnnnnnnnnnnnnnnnnnnnnnnnnnnnnnnnnnnnnnnnnnnnnnnnnnnnnnnnnnnnnnnnnnnnnnnnnnnnnnnnnnnnnnnnnnnnnnnnnnnnnnnnnnnnnnnnnnnnnnnnnnnnnnnnnnnnnnnnnnnnnnnnnnnnnnnnnnnnnnnnnnnnnnnnnnnnnnnnnnnnnnnnnnnnnnnnnnnnnnnnnnnnnnnnnnnnnnnnnnnnnnnnnnnnnnnnnnnnnnnnnnnnnnnnnnnnnnnnnnnnnnnnnnnnnnnnnnnnnnnnnnnnnnnnnnnnnnnnnnnnnnnnnnnnnnnnnnnnnnnnnnnnnnnnnnnnnnnnnnnnnnnnnnnnnnnnnnnnnnnnnnnnnnnnnnnnnnnnnnnnnnnnnnnnnnnnnnnnnnnnnnnnnnnnnnnnnnnnnnnnnnnnnnnnnnnnnnnnnnnnnnnnnnnnnnnnnnnnnnnnnnnnnnnnnnnnnnnnnnnnnnnnnnnnnnnnnnnnnnnnnnnnnnnnnnnnnnnnnnnnnnnnnnnnnnnnnnnnnnnnnnnnnnnnnnnnnnnnnnnnnnnnnnnnnnnnnnnnnnnnnnnnnnnnnnnnnnnnnnnnnnnnnnnnnnnnnnnnnnnnnnnnnnnnnnnnnnnnnnngaggagagaagaggaggaaatggagtagcagaaatattgagttgggggaagaatagaggagagcaggatgagggataccacattagagggagccattttaggtccaaggagagatctggcactagggagannnnnnnnnnnnnnnnnnnnnnnnnnnnnnnnnnnnnntaaggggagccattataggtccaaggagagatctgacactagggagatttccagagacctacaaggatgatacaaattgacaatccaggcaatggtagagaggataacctaaacgcctttcccctaaaatgagattgatgactactttttcatgccatcctagagacctcatccagtggctgatggaagcagaggtagacatccacagatatacactgtggacaatccaggcaatggtagagaggataacctaaacgcctttcccctaaaatgagattgatgactactttttatgccatcctagagcccttatccagtggctgatggaagcagaggcagacatccacnnnnnnnnnnnnnnnnnnnnnnnnnnnnnnnnnnnnnnnnnnnnnnnnnnnnnnnnnnnnnnnnnnnnnnnnnnnnnnnnnnnnnnnnnnnnnnnnnnnnnnnnnnnnnnnnnnnnnnnnnnnnnnnnnnnnnnnnnnnnnnnnnnnnnnnnnnnnnnnnnnnnttgcattctaggaggcccctggtggtggattagtatttttccctgatgtaagaagggactttgagagcccatcccatgtgaagggatgctccctcggcctagacacatggggaagggcctaggcccagcccaggatgatgtggtggactttgtagagcccccgttgagggccctcccctgcctggggagtggagggtggatggggtggnnnnnnnnnnnnnnnnnnnnnnnnnnnnnnnnnnnnnnnnnnnnnnnnnnnnnnnnnnnnnnnataactggatgctggcatgtagaagactacagatagatccatgtctgtccccatgcacaaaacttaagtccaattggatcaaggacctcaacataaatccagccacactgaacttattagaacagaaagtaggaaacaccattgaacgaattggtgcaggagactgcttcctgaatataacaccagtagcacagacactgagatcaacaattaataaatggaacctcctgaaactgagaagcttctgcaaggcaaaggacacagtcaacaagacaaaatgacagcccacagattgggaaaagatgttcagcatccccacatctgacacaggacacagggctgggagcccatcccacatggagttatactccctgagcctagacacaagtgggtgggtctaggccctattccaaaggatatgacagattttgaagaccccctacggaaggcctcaccctccctggggagcagaaaggtatgggatagttaatgtataagtttgggggtggcaggggagtaggggagggagagggacatggaattaacatgtaaaataatctttctaattaaaataaaagtcaaataataaaaaaacacataaaattataactataatgattagaccttatagggttaaacatagataactttagtataataaatagatcaatgactagggcagcaacagggactttagtagtgtttgttttacctatggaaacagcagaatttaaatagctgacttatggccagacatggtggtgaaggcgctcaatttcacaacatataaggcagaggcaggtgagtgtcttgagttcagggccatcctggtctacatatctagctccaggccagccagagctacacagtaagatcctctatcagaagaaaaaatgcctaatttagcatgcattcattttctctgacagttagatacagggtttcatgtacccaaggctggccttttacttctcctcttcctgtggtgatctctcacacactgccattacaagcataccctgccacacccaatgacttctttttagaacccagagttattaggtacctgtcatatatcaggcaacgttcttggtaatattgccagagctcctgaccataatgcctgactttgcattctaatacatgtatgtattcagacaaaaggccacaaaatacatgaaagtggaaaaataattttgtttccccttttataccaatattggtgagagagagccagtttcattctgtctccaccctttccttagcagtgttatgccttagagggaaagatgaaacaaaagcctggaaatgcccatatagacctaggccttcagctcccatttagggaactggcaggtcagtctttctggtgaatggaccttttccactctaccttgacaggacctgtagaaagctggagctgaggaccacaatttacatacacaggtcgtaatttctaggcctccttgtagtgttagcatgataaactatacaggttgtcctcacagcagtaacattttagttgggaaaacagacagtaagacacatatcaaatattatgacaggttttggcaagtgctatgggaggaaaaatgtaaaaagagagcaagaggaggaagcacagtgatcagggatatactgttttaaacaggcgagctatgtgagcaagtgagaactcagtgaaaatggagacagctatgccgatatctagggaagagctttgaagccagagacaatgtcaagtgcaaagccttgaggcaagatggggcatggaatgtttgagggatagaaatgaggacacagtgggtaggtagcatgggatgggcaaaggacaggaaggggtttttaataaccaatgctaagagctagttacaatggctgcacatacacttaagtatagctagaggtccctaaacttggaaaggtatgctgaggtcattttaggagaactgtatgaaagacttgccagttgagtagtcattgggcatccctgcgagtttgtgagacttggaatgacagaatcagaggtttctgctgtggaggactcacagtagtagatttggagaggttagagactgaggactgagagctcaagcaagtggtttctgcagggttgtcatgactctgaactgcaatgtagttagtaggaactaaatggagggtatagacgagagtgtaaggaagactggatgtgaactatatcagtctcagcaaatgaatataaagggcacaggagatgtgtgccttaataatgactgaaatttcaagcgtggctgattaaaatgacttgagcattcatacagaagtcaagagcaagaccaagtttggagtccaagatgatgagttcagttagacacgtaaatcaaggagaaatggctcagaccacaaaagcagaagtaaaatctggccatgcaaggacttctctttagttttacagcattaacagagtgatttttataatggggctcactgttgcagattgctgcttttgctatttaaaatatactttctgtaccttgctgatgagaagagatcagttatcatttgaatatatttcactagctcataaactgaagctctattgtctttactaagtcaggagtgacatgagtgcatttcagtgactcggtgggttagcatagagaaggcaacacgtatttcctagtctggtgtgttgtctttcaaataggcgatctcaaatggttaaaacctgacttttttttttccttttgtaatctttctaagtaatctcagtccaaaggacaagctcatcgtagtgaaggctcagtgtgttacttttgcccctaatcaggttatgagaattgtctccattaattgagtgatttacagggttttgttccaaaagagagcctggtaggtctctaggattcaggatggtaaagaaagtaatgcagaagtagccataagaactcaaggctaagcctgcaccacagtttgagacactgtgaagacagcaagagagagacattgagatggagactgagtgattgatttatggccagtttctaagtaagtttacaatgttctttctatgcatctggcaataaaccctctattattagtagcattcataaagtattgctaagcatggcagcatgcttttgtgagctgtcaagctgttagtctatttttacatttaatatttatttatttagtttattaacagtatagtacctcaatgatttcttcatgttgacaatatacccgagtcacgccaattttctgaacatatcctttgaggaaagattaaatcttattttcctattttttcctttctataattaggtagtccagaagggggagacaaaacattgattattggagtttgaagtagttacttcatgatgataaaacattgctttctcatattccaagttgattgtgtttttctaacggatttagacattgtagaatagttgctactgtaaaagatttagttttgatggtggtaacaatcttattaaaaatctgcattcgatcagaataaaaataatcaatgtcattatttttaactataaagtagaaaaactcatttgttagtaagatgaaaagaagacccgagactattgagtggtggcatataataagtgatcttttaaagaactgcacaaacactattaaagcactcattttagtcttcactaatttcacattcattactgcaatgactagctacttgctcagtttctaatgctttaacagtgtgcaagcttgtgtattagacttgttttgggtaggatgcagaggatctgggaacctggctcagtggtaaagcatttgcccagctgatttatgcaacaaaacaacaagacccaaaatacatcaagacaaggatatctcatgtatttttaaagattattcattgcttaaatctgttggaaccatttctagtctgttcatactgtgcaggagatgctgcatcttatggaatgaaatacctctttgcacctgttgttttgtgggccccaatgattgagcaagaatgatctttgtgctttggagtagtcatttgcaaattggcaacattgattcatgtaaacagatgatgttatgcaacttcagtgggaggaaaaagtgcaaaattactgttgcattagggaccaaaaatacacgctggaagcaattccatttctatcattggtcaataagtttttgaagccattttttctatgctgaaagaaataaaacattgtccttttgcgttttatataataaatgttcacctatcttatgtactcctgccttttataattaatttcaattaaatactagctttgtttaattaacatttaattaaaatgcttataaactctcagaggtcaaggaccatgtcttagtataccttagacattttcaaataccctagcctgtaacagcaataaaataattagtaacttctgttcattcactgcattcttataactcaagtgaagttgactgcatatgaactgaaatcagaagacttctagttattttataatgcttctcaaaaacagtgctcatgctttgcagatgaagttcagcatcataaaaatctctttccccccttagaataaaaagaaaaaatgaaatatctttcttcttgataaccttttctgctacactgaagaaagttgttcattattacacatgaactctcctagggcacttgtaggcttaaggggcctttcagcttcttctaattcaagttatcctgttagagctgtcattttttttttactgttgtttctttttctttctttttttttggtgggagtacagtctatagattggggcttcagaactgttaagtatttctttgtaacccaccctgtctcgatgttctttttcttctttcgctcagagtgtagatgtgtctatgtaagtgttctccttcttcagtttagatgtgggtgaagaatattgggaagggtccaccttccacgtcattcttgtcccattatccaacatttttctccgattgtgtttgctcacagcatgttgtacacagtgaatcatacttacaggaaaccttccatacaaaatgaatgcttaatgcagaaattataacagttgaacaaagggatgcttcattattttatttctgttacagccaacagtatttaaattatgtctaatgcatgctaatacatggtccttgtcttttgagagttcattagcattttatttaaatattgctaattaaacaaagttgatgtttaactggaaaaattatagctcttggactttgaagacctgttgttgtcagggatttactttttctatgccacagtgacttgggctaaaagactaatttttctttagtccacatctccatgtgtattttgctatactgatggagttatgaaacacttgtaaactgtcaaatatgctacatattaagccattacagtaataaccagttaaagagataattctgatggtagttcctaatacacatttcaaaagaaatgtgttgaactacaagtgctggctgataatgcatttatgtattcatttcattacttagtgtcttctttagaagccaattatgcttttatcctttgtaaaatctcacatttttgacattgctctttggctaaagattatgtttactgtcgcttctttatgaaaaggcataagcaactatggatgtcatcccctaatctggcatctaaatatgaaaaatacccatctttaaactgtgcagccatggcatcgttatttagtctgaactccttgcttataatactccataaattaggggtttaataactttctaaaactgatgtcatagaaaatgagaaatgacaaagtttctgacagagtaatttcagatttctggtagtagttaagaattttccctcttttaaaaaggaacataagtataaaagccccaaattcttttaaatacatgatttaaaagaagccttcaaaattttacctttcttctttgtaagggcaatgtaattgcgatgagaagatggggacgaggaagagagggaaaatgagcctagggaatgaaaaaatacatactggcatatattcacaaaagtgtgaaaatgaaacatgctactttgtgtattaatttaaaagactgccttaaaaaaacagtgcattatctgaaagctagtggagttgaaaaagggaaatgtgcttgttagcttttttgtcaacctagtcatatctgggaagaaggaatggtaattgagaaaattccccttacggacaagcctgtaggacattttcttgattcctaattgatgtccaagggctctatgcactgtgggtagtgccatccctggactggtagtcctgggttctttaagaatgcaggctgatcaagccacaaggagcaagccagtaagccacattcctccatggcctctgtatgggctcctgtctccaggttccttcctgccttgatgataaactataacctgtaagaggagatgatccctttcttcctgaaattacttttggttctggtgtttatcataacaacatttagcaaactggaataggaattaaaaatgacccacaatcctataccccttatatgaagtgttattatattttggtaaatttatttatacacagtcatttctttgctgcattattatgttattaaaattgatactaatttttagtcaatacagttttctttcagaaatgcatatttactttataatgatataaactgataaaatacttttggtagattaaatatttgataataaagtagtattgtaataaacccaggcacccttgaatcccttaattacagttactgaaaactcaatatccagaaccaattttctccttgtttggtgatggcgtgattttatctttggaaaagttgagtatttgaatagctatggtccatctttgtttttaagtgtatttttctgtatagtttgagaaacctgatgaaaaattgccatgcttcctagtctattgttgaattaaaatgaaacacattgccatcaagatgtaaattttcatatttacaaggcacaagtaatttgaagacaaatctagaggtatggggtcagtaagtaatagcagaaatgcatcaaagagtttgacaaaatttggcaagccctgcttttccttgtttgtggggaaggtactgctgaattactattccaaatgaagcaaggttttcatttggaaaaattacttgtattaaacagatgactaggctgaaatagctgctaaaacaatttcatgcttttgtttttaatgtagtccaattataaaatgtcacatcaaattgtatgtgaatacacaaatgcataattctaattttatttttgagttatcacatttcaggaagttgattaaaatcacccaaaatattttctaagctttttgtgtataacaaattaatcacttttgaaatgagttaaaatgagattggaattttggcagataatgttttgattaaatgaattgattgataattctatagttacttgtttggtctgttttatgaatatgtaaggaactccctgccaacttttcttacttacttcagggcttccagatcactgcaatgctacaatgaatatagctcccactcagtctcttgttaaagcattatattatactacatttgctttttcagtcttttcctcctccttctttttccattttttggagtctttgttgctgatttgttatacttcaacctttcatgcttaaacatgtatcaccaaagagcaaggaacttctccaacatcagcagtgcatataatcaaatttaaggtattttcccccactgacatgatactgttattcaactatgcccatttttcaaatttccccaacggtcttagtagtcattataattatattcttacagtacagttaaagattaaactttattgtctgtatcttcctcatctccttcaatctagaacagtttggatgcattcgatatgtttttgttaagactttgaagaaaccaagtcagttactttgaaaaatgtttcccagccttgatttatctgtatcttcatgattaaatttagggcaaatatttttagtaaggattttacataggtgcttcttggccttagagcatcttatcatgagggatatgggtatttgctgccccatcataagtgctgagtaagtgtcctttatatttgaatttaataagtgataaataggatgttttgagatcatgtaagtaaactattacttagcaacattttgtatatttttcacacctgtggatggtattcttgctccaagtcatttattacttgctttgctacaaaatgattttctgatattgtctttatttttgcatttgttatatggcattcttctgtaaaataggattttattaacctccccttcctgtttgaattaaaaaaataatcattatgctctcatacattgcttatttaaattcactgccacaacttattgctagtctgtgaatgcctttcatgtttttactaaaaataacatataaataaattaaataagtaatgtatgcttcatttgtagtgtatattatctttaatccagcggccattctgatagtcacccacatgaaacattcgacaagtacacagcacaacttgaggtagcaaaagacccaacttgaaacattaattcattgtagttataaatggaacttacatgggttactgcaaaatccttttgaatattttaagtattaaattctactttttttccctttgagacagggtctctctatggagtcctagctgtccttgaattcattatggtgaccagaatggcttcaaaaatcacaaagatcctcttgcctttgccttctaggtgctgggattaaaggagtgtgtcttcatgcctggcaaaattctccttttaaaactgggactatattaagatttgtagttggtttgcaaaacaatgggtctcattatgacatttcatacacacatacatacaccccttgctcatctttgtcacctaatactgtccttccccatccattcatcactctcttgctggtctcttgtttcctccaaatagtttaccttatgttttcatggtgtgtgtgtgtgtgtgtgtgtgtgtgtgtgtgtgtgtgtgtgtgtgtgtattaactttttgtcaatatagattctgcatgagcgaaaatatgtaatattttgcttcttgccaccattactctcttgtttttcttccctttaggccttttacttttgtatcttattcatatgtattttatatttatacatcctttccatatatgagacaaagcagtcaatgtttgtgattgtgattctgggttattttgcttacagtgacgatctccagttaaaatttacttagaaaaatcttctttggacatgagaattctcactactgaatgagtaaagttttcagtcatcttcctgttcaaggttcactactgtctagacattaagaagagtttgtcattctgattatcaagcatgaatttacaaatatgcccaaatttatttttgaaatgtaatctgcagtgctgttttctggaatgtgggtaaacactacattctgttattcagaactttgcagtttcttcattctagacatttgcagccatgctcagtaaattatgtttacaaaagagagctctacttaaagtttagcccaaagttcagagcccttattctgtttactccaaactgatggaaaattacctccccagcactgccatttctttccttctaatagagagtgtcatcattacctgacccattcgactggttcattttaaaccctttcacttttctttttagggtgtctgtcttgggttctgtcctttagattatgctaatctgagtaattaggataaaatatacctgaagtttcattatgtaagagttacttgctctctcttaaggtaaattagttttcattcacattttctcttttccttcagatttatgttcaaactattttcctaaaaaaagtattaagaaaataaattacagaagcatagataagcatttttatgggtaaggtaaacacgagataattcccttatataatgaacaatcatcagtaagttattttttatgcagtactaggaattgaatccatggctttgtccattcagtagaagtactcaaccactgagctactttcctaatgtaagttattagttctttagtgtcctgtgtgtatgcagaatagctcaagtataaatattttattgagcaacagtcaagtggaaagagatgaaattaaaattaagatgtaatatactgtatttattgaaatagttttttcagtggtgtgtatgtgtgagtgtggtatatgaacacacgttgatgtgcatgtgtgtttgtgcacatggaggccagatgaggatactatgtatcctgttctgtcattctctgctttattaattgaacctagggctcccagtagtttcaaccggatctgtctccccgccccaacactcccagccctgagattacaagcatacatatcaatacacttaactttttacatgaatagttgagatttgaactcaggtcttgatgcttgcacagaaagtgctcttacctgctgagccatcttcccagcccatagacttatagtctaagaaacaaaattaatgttattgaaatgtattcaattcatcagtgatataaatgctcatacatattcccaatttcaattgtgtgactcttctatgacttgtctgtagttatccaatgatctataagccatatgacttcggtattttttgttagtcatttatttaaaaatatttatttagtactttctgaatgtgccaggtacttttatagatattgggagcatagtaggaaccaaaaaggttaaatggttcctcaagttgaaagtttacttggacttgtgatagactagaatgttcatgtgtatatttgctaggtaggtatcagttcctgtcctctcaggtagatgctagtgatggataggtatgattctctaggtttcaatatatctttataaatgtaacattttatttgaaaaatacagttagattaaattctcctaaagtattttctttcctgcaaaggatacagaattacatgacaaatgcacaaaatcagaccacagtgaaatcttagcaaaccaagggtaaattcggtgatattggtaaaacattcagaacagataccactatacagtgaagggtgtgtgaacgtatgtgtgtgaggatgtgacattgtagaggaaaaagccttgcatgtgtgagttgtgactaaaataggacaagatgggagaagaatgaggtgaagctcagtcacagtctagtaagaattaggaattacgtatttatatgttactggtttggtgataaagcttaggcatgagcaggctggtaactgatgccagaactctttcctttttggatagaaacaaaacaaaacaaaacaagtaactaagaagtattaagagtagaggttttcagtggtagcattggcatcaatagcatgtagatgtatcaaagccattagtagcagatgcaaattggagaaactgttatcagttttcttttttttaatttttttattagttcaagttagggaacaagcttgtttcacatgtaagtcccttctccgtctccctcccctcacccccatccttcctcccccaaccccagtctaccccccagcccatccaaccaacactccccaggcagggtagcgccctcaaaaggggctccccaaagtctaccacatcatcctgggccaggcctattcccatgtgtccagggcaagaatgtatcccttcaagtgggatgggctctcaaagtcccttcttacaccactgaaaaatactaatctactaccataggccccctagagtgcagacgcctccttattgacatccatgttcaggggtctggattagnnnnnnnnnnnnnnnnnnnnnnnnnnnnnnnnnnnnnnnnnnnnnnnnnnnnnnnnnnnnnnnnnnnnnnnnnnnnnnnnnnnnnnnnnnnnnnnnnnnnnnnnnnnnnnnnnnnnnnnnnnnnnnnnntaattaaattccagatttcagctcagtgtgtatctgtggatgtctgtctctgcttccatcagccactggatgaggtctctaggatggcataaagagaagtcatcaatctcattttaggggaagggcttttaggttatcctctccaccattgcctggattgtcagatcatgtcatccttgtaggtctctgcagatcatctccctagttccagatcttttcttgaacctatagtggctccctctaatatggtatctctcatcctgctctctctcctctattcttcccccaactcatatttctgctcgtccatttcctttcctctactactcttctcctgctgttattgtggcagctccctctcctctaccctcatgctcccaattagctcaggagttttctaattatctgtagaggtagtgactatgagcttgataattgaatggagatcttttatggtttgcatgtaaggtgtccatcacatgctcatgtgttggtatacttggtccccgcctcgaggctttgctttagaatgttatgcaacatttgggatgtggagtctttctagagaaaatgagctgctgagaagagtgaactagaacttctgggctgtagcttgggtcaccatctagcctgcggcctctgtcttctgatcatggagatgtgagcaagaagcttcatgctttcattaccatagacccatcactacagtcacctatcttttctgtatgtgccttctcaatccatgagccaaaatagatctttcccccttaagttgcctatgttatgtgttttgtcaaagcaacgagaaaatagactgaaacactgggacatcaacacacatgtttttgacatcttctgtttggtgcagcaataacagaatagtgaaggatgagtaattcataaagagcaaaaacttagttattttattgttctggaggataggaagtccaagattaaaatgctagcatcctatgtgaccgtctaactgcatcttctggagaggcagaatgaattgttctcataaacctgaaagaaaaagggcagagaggtgaaaggaggatgaatttgctgatttatcatagtatcatcccaccaaggagggcagaaccctcatggacctatcaccttccataggttacactgtcaatcatggtcagaggaacacctaaaattgaacataggttctagagtggcagatattcaaacatagcagtcttcacatgggaggcacaagccaaaccctagagtttcaggttctcttggtcaggaaagcagaaaggagagaattaaaaatagaagaatatatcagagagcacaaggatggactagaattgctgaagcaagtagaggagctgaagagaaaatccgtgaatgctacaagaaaacaaggagaggaagagtcaagtgatgacttttcacaagtttgaagtaatctctgtctttaaagacagttgaagaaaccaattgatctaagataccattgtacccacagggctctttttatagaaaggtactaaattctgttgccatcagtgaaacttcacagccttcagtagtataaaagaagttatttattgtggtagtgatcaagaatttggcagttgcaatgaattaaatagccccttgacaacttctgaagaagttgctgtctgcctttaagtgcttacctgattacctgggagtaatcaaagtgctgtgcagacaggggcctcaggtaattcccaccgggaattacttatatctatacaaataactatgattgtaagcagattttctgagagtaactggtggcagataggactgatgaacaatgacattgttatttgtatagttagttaacataagaaataaatacttgcagaaattacatctgagagggcccagagctgaaacatatctccctgggctgtgctttttgcctgatgacaccaatcctgttacttcactcacagttatgttttgttctgcatactaggattcttatagcattaggaagaattaaaaaggtaaaggaaaaacctggtgaattctgtatatattattgttagtaaattttcttttcatattgtccatgccaaattttggaaaatgtaataatcgaggctagaatgcaggcagtagcttctgtaataaaataattttttattatgtaccatgaggtaagccttattgcttcctttgatttatatgcaaatatttctttttcatatagtttatagtgctttcagctgctattttggtttttgtgctttagactgtctctattctttccatgattgccacaataaaataggcaagaagaaaaattatggatgcttcctgtctcattttgtgtatttgtttcagtggcagtaccaagcttttaggaaaccactgtagtcaatgtcatgaatttacagtaaacctgtggaatttacatatataaaacatagatgtcatgctggtgaattcaacttacaagaaatcttgcagtgaggctattagtttcaggtaatttaaatctcagtgggaaccaagaaatggattttgaactaatatatattttgaagccctcaaagataggagagtgtaatatttctgtgtaaagaagaaaacatctgtcattctttaaagtaaagaggtttaaatttaatgaagtgattaaaagtaatttcaagatttatttcccctcgataaatattgtttttttgttgattttaatggaaattgtttgaaaaattagccccgttttcagcataatgccaagtaaaaatgaagcatatctttcaaggtagatgtttttttcaataggggaaatgcaaaatgacatgtttttgagactatatacccatcctaatataatttattcagcaatcctgttcttgattacaacgatagtgtcttctttcaaagggtatttaatactagcttttgtatcaggtaaacttacatgtttctaaaatgtcctctctaattttataactcaaaggaaaatgcacaactgctttaaataacaggtaggaacactaaccttatatgtaattttcagactgtcttttgggtgttggcatctttggcactttgtcacacatttgttttctaacatttatggtatctattgtcaagatgataagtcgcatgctccccatctgtgttgtcagttcacttactttaagcttatcacacttctaatatggaattataatgattgatttactaccctatctcttttaggagactgtgtgatcattgagggttaggattgtgtttgtattctaaataaattctgccctgggttcgataccttcattgatagctgataaattctagtaaggcccccaccacatgcagtgaatgattctgctatgacttagggtttgaaagatgataatatcattgttattatccaaagagaatcatgtaaattgtgcaagtcaaattacatgtcagagaatgtggtgatgtctgttcctttttttaactttcaggaactgataattccaagaacatagtttgtcagtgtgcacagggttcttttaatactgtaaacccttccataaaagggccatatatttatttctatatcaccagcaaccaattgttgactttataaggaaaatagttgatgataattaaaattttgaatctacagtcatcatatatttcttgttggaatgctttcccaaaggattctcagggccagatcaaagtgtgaatcatttttcattatttatttttatatgtattcaacacaatcacatgtatgataggcataagtgttaccatggcagtctcctcattggaaggtgtgttaaaaggactcaccagagtgagggattagttttattaacagttacaaattcttagtgtagtctagtagacactgcttgattccaagggggacgagctctaggcaggtcctagaggaatccatgggtaggttggcttgctgtctgactcctgagagaggttacacagaaagctctcttccccagtagtgaaaatatagcaatatgtgagtgacctgtgtgaccgtcttgtccatggaaggccagtagaaagttagttccccaagttcttttagttgttgctgttttactttgttttcgtttttggctatttatataggtgctcagttgaacttttaggaaaaatacagattccccaatacaaagcagatcttcatcattaagcattttatttcatatcaatagacatagtgaccctcactttaatatttaggaaacctgggatatattctacatcctggtttccacactattaccaatagccaacattataagcaagccttacatacaggatagtcttatacttgttctgtgaacttttttggcagcatggctttgtgtgaatactatcgatggtaagagaattaaactgtagtgtgtgacattttttttaaaagtactttaaattacactcatatgcttaatctttagacagcatgatgaaggtctcaggttatttattagagatgtctctaatgctttggtggtttaagtacctgttcattgacttgcattattgctgaattccttagttaagctttatgagtacactaaacatacctgacttcctgctgccctggctagagctttacagcttgctaaaaatatagttgcttatactccatgtcctcttgcaaatatagtcagctagacatactcttgcttgatagtttttcttagagccatataatattatactgacttttattcagactttaaatttctttgttttggttggtgagttgggctattcatatggcagaagctaagaaaacaataaagcaaagaaaattagagagttccagaaagtcttggcatgttgttttaatttcacatattctgcaatgttaagatcttaatttcagccctgtgaatgtggcgtgtgtgtgtgtgtgtgtgtgtgtgtgtgtgtgtgtgtgtgtgcgtgcgtgtgtgcgtgcatgtgtgcatgctatctctcagggattcgcatacatagatcagaaattatggtcttaaaattgtacatctctatctatatctatatctgtatctatatttccatggtaattgatagaaaaccatctttgattactgctttgtgtagttttatgtgctaacatgtttgctgatttcaaggctttacatgaatgccttggggactacaattacggcagttccatatttggcgtagctccccccttttttaaatcaggaattctgttttcaaccatttgcaacattacttgccccattttctgacttaaatttgggacaagaagacacttaatatgtcttagtgacttgcggatgtcaactcaggctttcacccagttaatcttatgatttgagaagaaaaaaaaaagatgttattgacagtaagatgtgacagctaacagcaaaggaagaactataaaaactatagtagtctttagttattgtaccaagagacaagcagccccactgttttcaatggttttgaagggcgttactctattattacaaacactagaaactgatcttgctgaggtgccatcaagagaagattcattatgctctccagcagtatagcctgtgtctactaccttttataaaagtttccatcaagattgcttctctcccttcccttttagttattttatttaaaaacgctctcacatacagatcatacatttatggatcactgggtatggggaatgaaagaccccattgtacttggttctctttatgaaagctcatggaaaaataggtatccttgatttccttagtacttaatataataaaaagcatgcataggttcaactacagagtaatgatgccaagtgaacaagtaaggattgcagaaatatttggtgtaatttgggacacattttttcatgttctctcatgacttcacataaatatttatgaggtttattttcaaaggaaataacttgctacctgcaagattgtttaaaaaattattttcatgaggcatggacatcttaaaactctgtaggaaaatggattgtgcttcagtctagaaattagataaaaggtcccttaaccctggtgggaggggaagcatttttttttttttacatattcccagaatgtatgtttctggtgagctggcagtgttttttatgacacaagagaggaatgatgtctgtttcattatacaaaagcctgtccctatcccagcctgtctgccaggcaactctctggtaatgtttcctgacttttttttaaaactgtgttttagggattgtgataaatacaagtttttcatggatgatctcattctgtccttattgtaagtaatcttagaaggtgatcattattatcttcagttcaagaggttcatatttacaacagggaattataatgtccaaggtcaggtgtgcctgacagtgacctattaactctcaattgttctccctgtctaaacgcccctcctccccagcactttggtaagacagcaaggtaggcttactctacttactataggagacagttacttatggatgttagaatatgcaacaaatgcaagctgactcttttttctttttttggcttccagtatgggaaactccctgtcataaatgaattgcaaactattatcccttatttttaatcaccgagctataaaaatgaggtttttggtgatatttactagtagtctccatggttttcttgccacgttctcttctagcaatatttgattgcttatttgcagacagggaaccagcttccataatgatagaatgcactgttgttgtttttggtatctttggcaataaaggctgaaacagcaacctccaccccaatcacaccacgtccaaacaacagcaaagtacaaggctttatcttgactccatcatttgcaaaggggtcaggaattcctgcttctttgtttttaccatagtacacgtttttatagctcaaatatatctttctgtgtagacttggtaattaaatattttggttagcatccagttatgccaacaacatttgttgaagatgctttcttttttccattgtataattttagcttctttgtcaaaaatcaggtgttcgtgggtgtgtggattaatgtcagggtctctgattcgattccattggactagccaatattaagctgttttgattattgtagctctatagtagagcttgaagtcaggtgttttgatggccctgggtgttcctttattgtacaggactcttttggttatcctgggttttttggttttccatatgaatttgggtattgttctttcaagttctgtgaagaattgtgctgagattttgatggggattgcattgaatctgtagattgttcttggcaagattgccatttttactatgtagatcctacctatacaagagcatgggagttctttccatttcccagcaattctatcttaggcatatacctaaaggatgcacattcataccacaaggacatctgttcaactatgttcatagcagcattatttgtaatagagagaaactggaagcaaccttaactgaagaatggatacagaaaatgtggtacgtttacacaacggagtactattcagcagaaaaaaaatgacatcttgaaattcgtaagcagatggatggaactagaagaaaccatcctgagtgaggtaacccagacacagaaagacaaacatggtatgcattcactcataaatggatattagacagaacaacggataaccagccaacaatctataacttcagagaagctaggaaacaaggaggaccctaagagaggcatacacagatccccccagaaggggaaaggaacaagatctcctgagtaaatatattggttaaactattttaatgggaaaatgtaccagtgtttttatttttgtttgtttgtttgtgtttatgttcagctgatttacaaacagatttaagggtgtaatcatgtaaactgggactgcttgtaaaacataggtttggggctacttttactatcagattagattgaatattcttgttaatttgaatcttgtgatatgtatgaaagtgtacactgcagttagtttaacacttcagttgttataaaaggataatttcaatagtatgtaaatttaatgtaactttggagacttagacttagtttgttcatttcaatgttaatttatttaagttttagctattttaaaataggtttatgtgtgtgggcctggtaatgttttttattttggtttcattacattttgaaatgaaagtgactttaaattaggctccaaggaggtgttagttaaattattagtaatgagtttggttgctttgaaaaaagcatacttgtcaatgaataaacataatatactgaagcagaattcctttataatgtggctgttacagggccactaccttttatgcaaactagttttgttacacacagtgatagtttcagcagcaataggattttactgaagataataaaaattatttttttagcaattggattccagtttataccatatcctggcttcagttagaggaaaagacccttgcaagcctgtttttgaaatcttagaaacattgatgaatagaaagagtttgctctcccttgtattccattttcattttgcttcccattgtgtatgctatgatgggtgttcatttggcttcagtttttctttgtatttgtatttcttcacttaaacaacaatgcattaacatacgtgtcatactcattgtataataaaaacaagaaacgagactagaacttctcccatgtgttacctttcttacctctgtgatcaaattcctgaccaaaagcaattttagaaaacggtttattttggatcacatttttagaagtctcttctggtggcatgggttggcagtggaggcatgagaggctacttaatttcaccccaaatcacaaagcagaaagagatgaataccactgtcccccctttcccctttttattcagttcaagacaacagcccatgggattgtgctgcccacattgagtatatgtctccaaacctcagttacccccaaattcccttacagatactcagagatttcttaggtgatcctaaatataaccaaccaaattgtcaatcaaagctaactatcacaatctattaaacatcagttggattttactgttgtgggcatagcaatattaagttttgtgtttggatggtatttttcattgtcaatcactagcatattttcattgtctttcaatgacaagctatagaaaggtatataattttcaatagtccatagtattgcttagtgttaggaagttggctgatactccatcttcaaaaatataatatcaaaaccaaaccagtaccacaaccaccaccaccaccaccaccaccaccaaacctagaggtccatttgatgtgaatagagattctgttttagcttagtttaggggaaagaaaaatagagctgaaaagcatgagagttccaggagtttggttgcaggtactattgaaaagaagaaagaactctgccccctgtcccccagctcctctttccagtgtcctttttattaacactcttgtagaacttccaggaaggtgagtaattgtcctctgtttctttgggaaacgatcccatacattctcccaatctataataattgacctaactatttctttgcttttaggtttctgtagatttttttgtttctgtagttataactataaaaaatagcttttatttgtgtaaccctgaatacccactcaacttgaacttttacatttaaatagaaattctaagaccattgatcttcctgtttgatgacttctgatgactactgtacaatctccagtccttgctcatagcctttattttccatttttattagagaagtagaaattaactttgtaaaaggctacttgctgtatgtgcccgccctttaccctgaattcatttaatcctcccagatttttgtattcagactctttgagatgaaggaaatgaagattagatagatagacaaaggaacttacctaaaacgttgtggaaggaatcagaactcaaatcctgatctgatatcaagtccctggtttgaccctgcaaaaggatgcttgccattcttgtattcttttgtcacattcctctattcatggctaaagagtgagttattgatacaggaaagaaaatattacttgaagttaaagtcttgggaatttactttactctgctgtcaccccgtagccaacataatcatttcacatcttaatgaaaacatctatgtttcttgaatagaaacttcagtcttttctgttgctagccataccatatgttattttatcagcaagctaagttatgtcagaaagttggaaatttagagcagaaaaaatatccctgttctcaactcttaactaggggattataaatcaaggctaaggaaaaatctgcgggtgtgttattttgtgcttttatatatttttatgtgcaaaacatagcagtaaggatgctaaaattatgtggtagaaatggaatctcaattcttaaccaaatgtatagtctgctttagagaaaaaagatgtacatgaaagatatacacatgcataggcatatacacatatgcttgtgtgtgtgtgttttcttagtcatcttggactgtgggaagaaaatgcaatatgttgtctggttcaatgataaatatttttttgttctagagtatggagagtctagggtcatgatgctagcacatatggtttagtgaagaccttctcggtttatagactgtctacttttcagtgcctcatcacatagcaatgttaagaatttttgctatctcttattttcctaataagatgaactaaatttcatcaccggtactgtacccaaatgacccaatcaaaagataattgcttcccaaaggccctaccttctaataaatcacattcttgtttgggtttaacatacaaatttttggaagacacaaacattcaactgtaacaggtgctttcataacataaataatgtttgagtatattaaaaaaaacaatgtggtggactgtaaaatatttaagtgccatgcttttaaaaaccagagggaaactgttgatataagacagctggtgagttacaaacacagagaaacaatatgttgttcatatatctgtaatagtttattcagacttctgtaacaaaatggcacaaatgatgtaacatcattgacagaaatcgttgctcgtagttgtgataattagaaagtccagatcaaggcttcaacgaagtttttggttactgaggactcaaagatgtttcacagatgacccatttttgcttaatcctcatggtagaataggtaaagaagcccattttatgtctgttataaggatactattcccattaatgagagctccatcctcttgaaatagtccctttcttagtggtccccaactcttagaagttttaccttgagagttaggtttcatcacatgcactgtagcagcacctcaatgctgagtagacccagacacaaaggcttcagttaaggtatgttgaatggatgaattttaaaaaatcataaagtatcatttctgacttggctgtatcctcacaggtcaggtaaaaggaagagttgaccagtttaacttcattaagaaacattcaaatagcaaaatattttttgttcaatccatggcaaattcaaaataaggaaataattcttttttcctatgaaggtataagttgcatccattcaaattgaagctggtgtgaactgcagtggatgtaactacaccctgttataacacgtgtctttaatatgtgtatattagttaccctcatttatgggattctatttgctagtgttggccctaacaggcagcaaaacaatggaaactcgttttcttttggttctgaaggccagaagtagctgtaagggaaaatccattttattgtgtctggggagacaattcttgtctctgcttccaacttcacattgtcttatgcttttcctgttgagactctcctcttttgtatctttaacaggattagttctcatagcatttatggctcgctaacatagtgatagattgatgtaaagttgatctcattttgagatccataattacatttatggagaccctttggccaactaggatcacatctgtaggttctggacataagcaacttttttttgtagatgctattcaatctcccacatcagctgatgtttacagcagtagtacttgtgccgacctccatgttttctctttggtcttataggagtttctgctaggtagggggttgtttcattagcaccacaaaaaaacaaaaaatgatggaaattaaataaaagctttgttattttcatggatatgaagctagtttcatagtatggcctgaagtctgttttgtttaatgttgtagatattcctgaaaacattatgttaaggtctgtagtcagtttaagcattctgtatacatcctttagctatcatttggtaatgtacaagtcattcactttcttactgattttctatttgcctatcagttattgaatgaggcataatcaagtcagtgaccataattgcagatttacctgtttgtcctgtagtcttattggttattgcttctggtttttgaaaacagttactagtcttgtatatatgtaggattatatattacttactaaattaactcattttgccctcctgtacattaaaaagtacctaataaaagctcatctattggtttattatatatgcttcttaattatggctttcaaaggttacttttgggtggataatactgatctttaacttaaaacaagttagcttttgttttgttttgtttttcaagacagggtttctctgtgtaagagctctggctgtcctggaactcactttgtagatcagcctggccttgaattcacaggatctgcctgcctctgcctccagagtgctgggattagaggcatgcactaccactggcaggcataataggctagtgttaaatggtgttatttgcctttttttggagccttgcctgtctcctgacttttgtattgttgttatgtattctacttgtatacctgatggtacattgtattatttttagtcatttatgttttaagaaaaataaacactataaactaaacatggtagctgcatgcacataggctgtgcacatcccaggatagctatgaatgcagtcttgcataattgtagaaatgaaaacattatattccagtgccaaaagtttggatccttctgttatggtctgaatattattacatacttcacttttaaatgcaccctactataatgctttatccctttatgtgggctttcagtatgttcctgatacctactttctttagtgtttctcatagtacaaatatttatgcattggattttgcattgaatatttgtattcatctgtactgttttcaacttaacctttgaaagacatttcactagctacaaaattctaacatattttcttttcttttcagtgatatgttttccttagatccttgaaatatggtcctgtgttgatttctttctggctttcattgatatgaatgaaaagtcagaaatcatttttaggctccattctcttctatgtaacaagctatcatttctggatactactcttctattctcatcctacatgcttttaatatttttgttaaataactgtaactttatttatttacagtgctgggatcttactcaggtcttcaggaatgctagggcaacatgcccccaatagccataccttaagcctttcatttattattttttcaagacagggtttctctgtgtagctttgtagaccaggctggcttcaaactcacagacatctgcctgcctctgcctcctgagtactggcattaaagaagcctttcattttcttttatgaaaagtttaaatctgtttgggctcattggatttttaaatttctggattaatggatttttatcaaatctaaaaaagtatggttcattatttcatcaagtggttggcctatctatctatctatctatctatctatctatctatctatctatctatctatctatctatctatctatctcttcactttgctagaaaagttctctatagaagaacaatttatatttttatttctttattttattcattctattttgaaagtaatattctgctcatagttgaggctggcttcaaatttggtatactcttgcctcagcctcccatatcctggcaaggtaggttgttctcacatgctaagctagaaagctgatttgtagtgctcctcctttcattaaggttctcctaagtttttaaactttcctttccttttgtgtggtttggattgatactttccatgacccttattttcatttcactcttttcactactgtagtgtatcatctattaaacacatacattggaatttagttgcaggtggggcattatttccctgctctatgattccatatttttccagtttcattcctcttaatagtatatacattttctttaaatattaaagtcacaaataatagctttaaagttcttgcccatgactttacccttatctctgtctgcatttatttccactgactaacttcctgctcatttggaaatatattattttttctctagctgtgggatataggaatatggtattgttaactattagaagttgcatatttttctccctctcctttatttttttggtgttttgagacatgatatttctatgtagccctggctgttctggaactcactctagtccaggctgaactcaaactcggagatctgcctgcgtccgcctcccaaatgctgggattaaaggcgtgccgccaccactacctggtcctgaagttatgtatcttaaagcatgtctcttgtttttctaagcacacttcagatttaattcagggcttggtaaatgctgcaactctatatgaactaattgcctcaaatagtaaatttctattatatgcccatcagttaattttaagacttgttttaaagctttgcttgtatgaatctaaaataacacttgttctatggctaattcagttgcactcttgaagtgtggtgtttttctagtttctaaagcagcagttctcaaccttgatattgctgtgactctttaatactctttaatatagttctcatgttgtggtgactaccctctaccataaaattattttctttgctacttcataactgtaattttgctactggtaagaatcataatgtaaatctctgtgttttcccagtgatcttaggtgaccccctatgaaaaggtcatgtgaccccagaggagttgtaacccacaggttgagaaccactgctctaaaggcttggtgagatctcttcactctaatcagagcacaaatgtctcagccctgtgcgaactgtagtagttgaatttattattctctgggagccatttgcccatttctaatggagtcgcatttatatttgtgcagattgctagtcagcattatctcaagtagactgtcttgcctgtctctagtagtgttctctggtgctatgcttcataaatcaaagctgcgccattctccctggtctcccatttctcttttccagctccgccgcagtactgtgcttcgtccttaccttgcactgcactgtggaaaatacacacacacagcctggatcactggacgtctggcttagtttgtttccattctctcagggatcacagccctctgcagcctgttgtctaatgtctgaaagcagttgtttcatgtattttctctgattttctgtttgtttacagttggagggctagtctactaacaggtacttgtttatggccagaagtagaagtgcctcgtgtggttttttttcattgaatgaggtgtgtttgcttgttactctttaattaacagactgttgaattggtgttcatttgttcctttaatgtcacactttaaaagtaaactttcttaatgtagggacaataattacatgtcccactccgccacccctgtgtataaatctgtgagatgatcattcaagtttaacctgtcataccatttagttttttaaaaaagatgactacatctatgagagatgtctacatgctgaatttgtgtgtagtctctttgaagtagaaagaacattacaattgtgacctacatttttttccactggattttcttcactgatagctaagtgttttgatagagtgtaaagcaacattttattagtttctcaaatcccttgctatcctctctttgcagaatgaaaatttcaactctttatgtcatagtggggagtatagaatatgaaaatataattgtccatgtctcttaactgcaattttaatttgaatagtctcacaagatgcatttcttttctccaagaaataagtgaaggctctttggagttcagagctaaaattaagcgctcttttaggtcgagtccccaggacactcagtttttcattctaggcagctctgtctcatctttacatttcctgtgttgtctctgtagatggttagaaaagcaatacttcatcaggttgctgccagtactcctctgtgagatggttattaaaagcatttcctttcctcaccaattcagagtgccaggctttcactgatcttatatactcgagctcttctgacacaagagagagggtagctaaacagctctcaaagctgggtttatagcctttcatctaatttggcctttcagtgaactaggtaaggtggttctccatctttctctacctctctgtcattaatatggttgatcgttgcaaagagctgcagtcaaacaaaagtggaaacttttgtaatttatgtatagctttaaaaaggcaaagaagtgaaggattattgcagttggtgcagtccccaatacaattaatatcaaatgcatataaatcctattagagatctgtcatgggtgaaaaaggaatatgaaaaatgcgtgacctatctttattagattcggttagagagagaccatacagagctaaggagctttacgaactgcatattaatcataaccagtcttctgagataaacctatttcttgtaacttatcaaagccatacagaagattagtcattccctttggtcaaggaaggttttacatattgttctgagttttgaacatcatagcttccaaaactgattaacagatattctaatactaactagatattgaattatatagtttagacagctattatcctataatgacccctcaatagggagatgggcactttgtcaaaacctctgcattattgttttgttgcaaggaggcactctagggagttgtattagacatcacacaaaagaactttgctacagcaagccatagttaaattgtgcagaaaacacttctttcttaaatctttattttaagcaacaattgctcgatgccggccccatttttttaatgtcattttcaattcctgaagtcttttatctcgttgagaaggaggagaattagctcaaggggatggttaagaccatcatgttcatgcactgtagtactgaagatagtggatgtagaacagctatagtctgacaaagataattaagactgtattttaaaaatgagacgaagagagcaagagaatttcacaagattattggactttttagatagcatataagcgtagcagcaatgcattgggttttgttttgttggccctaaatactgagcaatgttgattgtcacttaattaccctaaatgtattaggtaatgctgacaaaaacagacaagtatttaacaatgaagatttttatatttaatgatgtactattttgtagctttgattttgcatttccaaaccccaaaaaagttttatagaagtatgtatagtgaaaaaattcactcttctcatcctatactataaggatgactaattatgataatccctcttagtactttaagagccgatttactgatgaaagtcatagaaagtggccccataataaatctacagctccatgagttatttcaaaatgtctatgtctgtgccatgaacactcaatttaagaaatgaacattgaaatcacttctcaattcttttgacctattcaaatgcaagcactaatttgctttacaatactcgtattttcagctgttttaaaatttaacatcgaaaacatccgctttcatggatttgtgatggcctttcctgtgtttcatataattgaaattaaaaatattggtctatacctgaagttagccatttttttctagaaaaggatagatgctaaatatcgtaggttctgtggcacattagtctctgtcacaaacattcaagttgactgctgtagatggtatagaaatgaatggtatagtgggagatttcattgtatgattagattacagtcaacaaacccattgagctataggcgggcatttgtttttccttttacctggaatactcttacaacatatgttgttgttattattattattactattacagtaattttattttatgtgcattgtgtcttgcctgctttgatgtctgttcaccaagtgttcatgtggtgtccacagaggttatgagaaggttttaaatcccctggaacttgaggtaaacatagttttgagctgttatgtggttgctgcaagaagtcaaaatgctgttagtagctaagttatctctcaagcttcataacatttgctcttttatacatcaatgtgcatttctatttggcatatagaaattatatatcatagggcaagcctaagttcaagtaggaatgttgaaaacttttctaaaaccatagattaattgaatgctccaccagtaaataaacttatcattgcttgtaccaatagtgatttttccaagatattttcctgactaattagatattagacagtatataatgatgttttcattttaatgtcataccattagtaatcctgaatattaatgtatatttggtcaaatcaaaagaaagtgtggaaaatcttatataatatggtagactctgatttaatcagttattcttagtctcttaaaatctccatagtatgtatgatttctagagtgagctgatttttattgtcaacatatgactgatagtaccattagtgtagtcgtagagaaaaaaggagaccatgcacatattaaatagcataatttctgcatacatcctctattaatggtcttttgaatgttgtctttgaactttattttagagtctaaacccaaaaagtcttttctcaaatgtttacctcacactttttgatattacttactggtttatattctctggtttcttatggtcatatctttcggccccaataattttgcctgattcctgaagattttgttcaaaggatgaattttctaccttgcctcaatgcaccaacatttttatctttagactttcaactaactttgcagtcttaccatgtagaccctaactctcatcaagttaaaatatctaaagtgctcattcatacactaagaataaatactggttccactgtcagctttgggagcccctttcctgaggcaggacaatctcttagcctagattcactggggaaggcctaggttctgccccaaatgatgggacagactttgatgattccccatgagaggcctcactcctccttgaggagtggacgggtggtgggataggggattgtggggggagtgggaggatgtgagggagaggtaactggaattggtatgtaaaataagatggtttttaattaaataaaattaatttaaaatatctgaagtaaatttattataatcataattgcctgtccatgtcttcccatacaatcaccagatcaaagtcccaacctcccagattcaccatgtagcaaacagagaatctagaagtgttctgttaagcactgaaaattagcaaataataaaataatttctttccattggttaaatgaaaggtgagtgaaagcttcacattttatgtcttttttttgtttgttttttttgagacagggtttctctgtattgctttggagcctgtcctggagctcactctgtagaccaggctggacttgaactcaaagagatccacctgtctctgccatcctgagtgctgggattaaaggcatgcaccaccaatgcccagctttatgtatccttttttaggaaaggaattgttatattctaaatatgaaatactatgaattttaatatttgttctataaatgtaaatcattttacaaccataattttggtagatgggcaagttaattatagattagagaaatgtagccatagatcattctagttaaagaatggccattgttcaagtctttatagtgttcctaaaataaagttataaatacatgctgaaatttaaaaataatttatccaacataaataagtcatcattatcatcttgaaaaagtaattgctttggataataagaaaaaaaaaaacatgtctttcgaggcagacactgataatgctccaagtttagcttaaatcttttgaggaaagcgtctgctttgtaagattgttactttcaaatatggaagccattatctcatggagttggagtgtcactgaaatactttatccttcctggatatacaacctagaacggcatcacaccaaggtaaatcccctggttgtaattatagaaattaagcaaaattgtaagtatatatttggccctttctgtattttaggtgtggttttaacagcttgtatttagatttcaatggggacagacgtaaaatgcatgtacacacacacacacacacacacacacacacacacacaccacacacacacatcaaatccatgtgcatacacgtaaatgcatgcatagatgaacatacaacttacatgcggtattgtctactttaacagaaaacagaaaattacactggggtcatatacagctataaccaatgaaatgcaatttttaaaattaaaattctgggtgttgccttccatagtgggtcttcagaatctgtcatatcctttgcagtagtgtctagggccacccccttgtgcctaggctcagggaatatccttctatgtggaatgggctcccaaagtctattcctatgctagggataagaactgatctactacaaaggccccatagatttgaggtctcctcactgacacccacgttcatgggggtctggatcagtcctatgctggtttcccagctatcagtctggggacaaagagttccaacttgttcaggtcagctatttctgtgggtttcaccagcctggtctgaacccctttgctcatcactcctccttctctgctgactaaagggtataggataggtagggtgttagttgtcaggggggtaggggaggaggggaggcagagggaactgggattgacatgtaaaataatcttgtttctaatttaaataaaaatggagagaaagaaataaaaaagacagttggattgttacttacaaaactaaacatactcttatcatatgctcaattgggttgaaaacttctgtccatgcagacacctgcacttaggcctggggatgtgatttagtgggagagttctcacttgcataacattcaggaagctctagtttcaatcctcagtattgcaaaatcagtgagagacagagacacagagacagagacattaaaacctgcactcaatgtttttggcagctttctcttaaaaaatactgattttttatattatatgaattggtgttctgccagataccagatcccctggaatagacagttgtgaactggcatgtgggtgctgggaattgaacctggaagagcagtcagtgctcttaaccgctgagccatctctttaaaccttttggtagctttcttaataattgtccaaacatggaagcaacaagatgtccttcaatgggatttttagtgataaaaagaaattggctttcaagccataaaatctgaaaagaccacatattgtacaattataattatgtgacacacttcaaaaggcaaaatatgagcacagcaaagaagattaatgctgaggggagagggatagatggacaaataagcagagactgtgaaattttaggagagtgaaaatattttgtatgaaactgtagctttgggtatgtgatacatttgccaaaagtcattaggtaacaatctaatgtatcagcctagttgtatgtttatcaattgtcttagggtaaaacaattctgggtgttcttacttgaatctcgctggtggattattataatagaaaagagaaaaataccagcaaaataatatatatgtaaatgggaaattccacagatagatcagaatactatctgtggcagaaattagtaatattagctttttaaagaaaacaatcaccaaaccttctctaaaagcacatctgtatttattccaatggcaggtgacaacagtggaacaaagagctgtcttttcaaatttcacttcctaagctttccgtgtgtctcagttacagtgatggtgaataatggagaaagtcagcacaagggcagattctgcgtaattggaaaagataatttcctatactgtgtgatttgaaggccacactaagatctcatctaccatcctctttccataactagacacacccacaattattccactcaacagataataataacattaggagtaatatttctaaacagtcactattacaatacctatacaatgctttgcctagattttccataaaccttcttatattctctctctttctatttatacattagaaggtagtgctccacaagaactcggttcaggttgaaggtgatgagaattttcagtctgagtcagattgcatgagagctagcgcgatggtggcagtgttctgttctgaacgcctgtgtgacagtcacacaaaagcccaggcagagcactttttcagagtggattgtttcttccggtcatagtccttcatatcaccaaaggattcaaatgttactgtgtcatccttagctataatattcatctgctgagtggtttgcacatacagtcccctcagatatgatgaataaatgtaagcagacttaataaccactatataggatacctctttgccatagtccattctttgttccagctttgctcaaatgaagcctatttcaaatcatccctttggaaattacaatcttccctcacgacacttcctgtctctctcagtttttgtccatagcacttatgcctgtgaattttgtctataaatataaatctatatgtgtgtatatatacatgaatatatatttatgtgtgcacatggatgggtttttgtgactgtatgttttctttaatctgtcccctcttaaatgcacactgcattacaaattatttaatgagaatatctcattattcctagactgtttttcttccatgtcataactgaagagaaacctccttcttccaaaataaacaacttgcctatttcagagtagcaatctgtgtttgcactttttaatgtggttagcatgtgagtattgtgccccaaacacatatcatgagatctacacttttaataatgttttaagtatgcaaaagaaaattgattgctgtagatgcattgctatacaacatattttcaaagggttttcatgtagcatgactgaataaaatcactgaaaatgaactcctttttgcttactcattatctagcacccacggttctactttctgctttgattaattgattaataatttgactgatttgggtacatcctgtaaatggtaccctatagcaattgtctgtcagctaattccagttaccataatattctcccatttatccttgttatagaatataacaggatttccttttatgtggctgaataattttctattatgtgtttctatttaaggaagagactattctttctccattgtgtattctacttttgtacaatattagttgagtttatgtgagaaagttcatttctgggttctatactgttgctttacccaattttttttaacggcaataatatcatcagtctatatttgatttatattcctattttatataccggcataactggcactgtgtattgaatggaaaatgttggcacttagagaagcctgttgtcagagggatatctgttagctgaatgatgtgaacagattagccatgtgaataggaagtctctttcaggctaagaggaaagttgaaattaatttaaaaggaccttaacattagaaagacattaacatggtgacagaagaggaagaaagtcggtatgattgtgaaagctgtttgtggaccatgtgataaggatcacacagttaatcagaagccaggcctatttggccaatgtacaaattgatttaaaagtgttgttttttcaaatattaggatatttgttttgttttatcctttgctctttttttttcctccgggtgaagctgtagagctgactaacctttggcatgagtttccatctcagtgtctcatgtcttcacatgtggtgatacagagtgctttgtgacggacctcataacagagtccctgtgcagacaggagtctagaactttctcatttgctacatgatatgcagtgaatgatgatcagatcatgtctcacgtctactgagtcaatcatttcatgtctttgaagtcccatagtttcttttctactggaggtgaaatctgtgacctccctgtggacgcttggccccttagacagctgggcatttagatgtattctgtgcttccaatgcatacttacatgcccctgacaaactttggtttctaaattaggttcagtaagaggttaacaagaactaagagtaaaacagtacatctgtaaaaactactacaatacaggtggtccaaaatgcacaaattgcttattggtatgacttttccattaagcatttcatagtgctattgaacttgcatggctgaaactggaaagcacaaatctatataatggagagctgttattaaagattgaaattataggagaaacactgaaaggaatgtatgaacacttcttaatttttaatgatgaattctttcaaatttcactatggttgaaatgtaacttttcaatattaagtctagtatcactcatctttccatcattgtgagactttgtgtctctatacatagctttttgtagtcttcgaaaatgagagattggatgtaactgacaaattttctgtcactaatacttgtactgggtctgaattttgactcttaaaatgctattttcactctaaaaacattttaaaggtacattgaaatttttcattctttttatttatttatttatttttgagacagggtctctgtgtgtaacagccctggctgtcctggaacctggctggcttctagcttacagagatacccctgcctctgcctcctgagtgctgtgactaaaggcttgagccaccaccaccttgcacttaactctttttctaaggctttgtaaaccatgtgtacatacaagtaagtctcccacactcaaggctcacaacaggcaaaattttcttgtctctttcagatttctctgtcaaatacattgttttgactgcttttaaacatcatgatgtataacaccaagttgtaatttcttagtcatgactgtgcaagtttctatactactctttgttagattgcatatagatcataaaatacatttaaattttctgaaagacagcctggcttggtagtacatatctttaattatgggagagagaggcccgtagatctgagttgagtgtcagcctggcatacatagagagttccaggcccaccaggtctacatagtggaaccctgtgccgataaaggaaacagaatttataaaagatgggaattggggacattttctggctttaagaatccttccgattcctattaaatggtatttatattgtaaatttatctcaattatgtaaacataactgttatgtaatgacagcaatcaaaactgaagaatattagatctcattttctcaatgatgtgcttttctctacttaccttccaagtaccttcttgcttgctgtcgactgtacatgtgactaaaaggaagctgagcctagaaattgttccctagtactgtttgattaatcagaaggtgccagttcaagaatagtttagatatctttgagcatacattgtaatatttattgtatggaggcaaggagctaaacatgctggtattcacaacgactgctgcttttgtacctgtggtaatgacacatttcagagcaagagagcctgaaagtttaccttctgctcacttcagaaatcattaggaatattttaaatgatcaactcattgctggaaaatcaagaaagtctttggaaaactagaaatagattcactttatcatacctttctccatactcgtcagagcaactgagaggctaggtgtgaaggtaaaattgcacacaaacacacacacacacacacacacacacacacacacacacacacacactagggagaaatccaggtaaatgctatttgattggaggctacaaaaggctttagaaaaggagaaataaaaatagaagtgttaaaagaaaatagttcttatttctagtctatatgaaaggggaccttttgtaaataatatgcagtattgaagaacatgtggtgaatttgaagcaaatttagaaaaaatgataatataggaatacctttgtgtatttgttgttatacagctgaagaaattaataccctaatagtggatgatttgtgagacagtgcatttcttgaaagaaaattgtgtgtgaaaatagaagccatggaaatgtttataatgacaccccaaattctctttctagaaaaatttcccaaagaaggaaatgagcaaaaatgatagctaaggatatttaatgttacatttttctcatagtaaaaaaaaatctaggttttaaatgagttaagaagtcattacatgttaattgataaactattacataattgaagatattctatatacttaattgtatgtgatactttaataacatattgaatattttacatttatgtttcttagtgttttgcaactatatatgtctatataccacagtgttatggatagttgtgagctgtcctgtggatgctgggaattgaaccctgtgcaaaaacaagtgctcttaactgctgagacagctctccagcccctttcattacatattaaacagaacacattaaacagaaaatgcatatagtatgaaatcaattaaaaatattttgcacagggccaaaaaggatagattatgtgacaaaatattaatagaaattctcttcagatgagaaaacatggtgacttttatttttgtattttgtgttaactatattttctaaatttcccttaatgtacacatattcgatttaaaataaaacaagaggaaataaatgataatgtacttagattgtattatctttattttctcataatgtttatgatatagcaattacaaatttaataaattctccatctctgtctttttttttgccaagggagctattatttaaattccatttcattcagaaaacaagaaatatattttctattttttgatgtagtggaaagggatgaaggagctgttaataagttcagatataagcaatataagtatgttcaatgtgtatcctattaacttgaagggaaaacaggaatctgtgttccttgatactttccatctcatagccttattgctttcatcatgtctagttttcaatttaagatgcaccattatattagtaatttatttcaactttatatgtgggatgttgtatttagagaatctataatgattgtcaattcaaggggaattatcatttagaaatagtttttgggtggattttgtctctttttagtagactgggaaagtaaaagcaatgccttctaaggggaaatagtgcaaacagatgaaatttaactgagcactaggcatagaaaatagaagagctcatgtgagggagattctatgttcttaaatgatgaactgtttggaaatgagatggtgtggtacagatgtgaagagtaaaacagaaacaagtctggtagctggtaacatcttcccatctgctctttgtattacaaataatagtcccattgtctaagttcatggcaatagtgcttcaaaaacagacaaataaatgcttcatagtgttatctttggcttatgtaatctggaagagatgataacatcctgtgttgttgtaaaggaccagtagactggattaatttccctacagatgttcttcaggatgtttcttccacatttttggtttttctcaaaagatacatctcatgagtgattcaggaaaaatgccagtggatttgcatttgtgaggaattgagtcctctaattatttatggaaagcttaaaaatgaatgtgtaccacattttacaaatggatgctgcatgccagctagcacaattgtattgcttaggtgcctctcttaatgagaggtatttactagtttggtaagtgtttctcatatgtaatgacagtaaaccttcccttcttccactagtagtaaatactttctagtgtcttccaaatcagatgaaagtttcatttcaaaaatctcaaaagcttgttattagatgactaccttagctttccttatttttttttttactatttttttattgcaaactggtggaaagttggaggtagaaccaggttgaaaataggtccttgagcagtctttgtggtctttctctctcttctagcttcctggtaaacaatgtgagcaccttcttgcagtcacatttacaacatattggtgttctttgctcttgcccagttcccaaaagcagtagagctaactgactagggactgaatcatctggtacctcagccaaaatgatagttccttctttataattacttttccccctcccttgctttcccttattccctgccacttcccctccttcctacattctttttatctcaggtatttgtagcagcagagtactgagttacaaaaaaaagacaccactaaatgataaaaaatggaacaatcattatagcatgttaatatcagtttgctagtgctgagtaactgccatttagggcagagtcaatctgtgttcttccatataaactgagcattctctctcattcagtttgtctcacatgagattgtcttagactagggtttttcaatcttcctaatgctgtgaccctttattataattcctcatgttgtggtggcacccaaccataaaattattttgttactacttcataactgtaattttgttgttattatgaattgtaatgtatatatctgtgttttgtgatggccttaggtgacccctgtaaaatcatcttttgacactcaaaggggttacaacccacaggttgagaaaccactggcttagaccaactgagatggtatggcacatgactgatgtgacagcatattagagctggaatacatcgtttatcccaatgtgacctttctcttaaggggaagtatcttgcccaagtcatagagctggataggcgaaagtagaataatgcaaattattggatggaaagaggtagtatttggattacatgggggaatgattaaatgtttgaaaaagaatagttattaatgatacatgaaacataatatttttattaagcccacattttaaagagcacatttggggactaattttcttacttcaatatttgcataaaaatagaaagtgatgtattaaaacagaacatttccaggaaaaaagcaaggtatcagctaatgtatattaatcaatgagtgtattcatggtttcaatccatacctataaactatagtttctgtacagtaacctcatttagttttcatgtttctctgtgtacttgtgtcagtaatatgtaaatgtacatatgtgtacatgttggtgcatttgtgtggggttcagaggtcaattttggctgttgatttttctttgcaacagtctagggcctggaactcactggttaggtaaggctgactagccagtgagccctatggtcttcttgtctattttttccaaggactgagattacaaatagacaccaacacacatggctttttctatgggacctggagagcaaatataggccctcataattgcacagcaagcactttatggactgagctgctcctcagcttttttgagatgtataatacttttgaaaacacctgaatatactattgttgagcaagggagaaatagctaagaatttagagagagaaaatgaagatctcgtatagcatattgtgaatagcaaagtcgtagtgttaaggatgctatttcaaaggacgattattgtatctgttatattctattaaaccatagtccaagttaatagaccatgtaaagttaaaacaaaaagaacaccttaaaagaactggaaggagaatattcaggggaaagaaaaagaattgtttgagagggacaaagccttcatagaaaaaaataattatgtctttccaacatttttagtgttaaggaccctttatactttcaaaattattgcaacctgcaaagcctgttctttgtatcatttatgtatcttgaaatttgatttaaaaacaagaatattttagaacacaacactacagaggaacatgctctatttacaattagaatagctgtggcatcccaggtcaggtagcctctggaaaactaatgcttttctcgtctctgcatttctcactgcatcagcttcattttctcttgtcagagggagatttctttgtctggtaggggtcttagttattaccagcagcaagaacatagtagttgtgtttggatacaagggttcaggtgatattgttataaatggatagaggagttgtttggttggtaatggagtgaatttttccatgctataaccttctttcttctttagaaaatcacagtacacattgtcatgatacataatttgaagtaacatatgatagaatgcttaattatctgtagttaactcactacaccatatcttaggtgatgtcattacacatatttataagtatctcacaagacactagtatcccatgagtgtgggaaatttatttcatttgttgtaaaattttaattccatttttacatcatggagatttctaatcttctgctctactccccttttcatcatcagacagattgttgtgatttatgagaataagaaagagaaccatagctatttttgcaaatatgtatgtgtaatttggtgtaatgagaccatatttttctgaagaaaattatttaagtggtatgtttgggttattcatgggagacagaaaatcaaatatggtaacaatacttcagtatgtattagcaaaaggcctatgatatatttcatgtgtttttaataaatatattaatataatacaaaaataattattttttcatgataaatgtagctacctgaaagcaatatagttattatgcatactgagaaattacttaattaattccctttaagatcagaggcaatatcttgatgtttattgttaccagggttaccagtattgacccatttccctcttttcctgaaaggagaggacaacgtgtatttgccactgtgattagagaaatatatactttataaaggaatacataaaattatatgaatagctgataatagatataaaatgcataacaaatagcaccctaagcagtcattaacaaatgtgagtcttatttattataacaataagaaagaatcactatcaataacttttctataggattatttctagggactgacaacaagatgtgaaattttcactgtttgtttgcctttcctttaatggctannnnnnnnnnnnnnnnnnnnnnnnnnnnnnnnnnnnnnnnnnnnnnnnnnnnnnnnnnnnnnnnnnnnnnnnnnnnnnnnnnnnnnnnnnnnnnnnnnnnnnnnnnnnnnnnnnnnnnnnnnnnnnnnnnnnnnnnnnnnnnnnnnnnnnnnnnnnnnnnnnnnnnnnnnnnnnnnnnnnnnnnnnnnnnnnnnnnnnnnnnnnnnnnnnnnnnnnnnnnnnnnnnnnnnnnnnnnnnnnnnnnnnnnnnnnnnnnnnnnnnnnnnnnnnnnnnnnnnnnnnnnnnnnnnnnagtgacataaccttttctgaaaacctatcacattgccagacgtttgaaatgcttcatgttagtgtgatggagggagacaagctctgtgtttttcttagcaccatctttctttcctgttatcattttagagggaaatttcatgacaccttccaaaatttggcgcaataattccagtccttgagattcattccctgcttttgtcgaatgcaaatttgtgaagatgtatgaacaagaatatcagatgtaatcttgtccctcagtagtgcattggcaagccacgtcttctttactttatctttggttcagggtgctgcagccacactaccctttttaattcgggaatatgccaggtcatttccactcctaggacctttgtactatcagatacgtttggttttaatacttcttcccttgtcttattccatgcctgactttttcttgtttttcaggtctcaagcattacttccttaaagatgctgttcctaacttcccaccataaagtggctccacatagttctctgtcaaaatgtggtccacatagctattactgtttattgtttactttcctgtttatttgctgtttttctgaaaattggaagagcaatatacttcgcaattaaaggcattggctgtaaagtcaaggctgggttcatgtcctggccctgccatttactatctctgagcacttggggacaatttcagcttaatccccatatggttcactttccttatctgtaaaactgtgtaagaatagagcgtatcttacagacttgtgagaattcaatgtactttaacatctgtgttacttactttctccttgctgtgataaaatacctcacagaatcatgttaagggaagactggatttatttcggggcacagtttgagaggaaagagttcatcatggcaaggaaagcatggcaactggggcttcatctgtggatcagggagtttgcagcagctgtttgtttcttggtaccaaaccaagaagcatagagggtgggtggtggtagagagttgaattataaccctaacccccccttgattattgctcttcactttctctagttaggcgcaacctgctaaagattctgcagcttctaaaacaatgcctccatttgtagaccaactccctgaaaagtcacattcaagccctagtagcatctaaacccattcaaagcactagttttggtatgttagaaaaaaactccaaaagatacaaatgaccaagcaaacaaaaacagtctacttattgatccagcaaattagaataatcactcatcaaagtgctattttggaagtgtctcagttaatgaggtagttgggcatgtgcagatgagaatctcctttagaatttgctatcagtgagaatgacctagagcatacttcaaatctcagtgtcacagctattttctgctaatgcagcatgccatcatctgccactgaaggtctctggctcatattatgctcatacaggatcttatgctctacatatagcaaaacgaagaacaagacactgaatgacatcttactacttatgttaggaaagaccatccttcacttatactcatgttgcattggctacatcagagaactacatctgatttgtttttttttttactttggttatttgctgtattttttaaaattaattaattttttaagcattctaatcccagttccccttccctccttccctcccattcccttcaattcccccttctcccatctgctccacagagatggtgaggcctcccctagcaagtctactaggtctgtcccatcatcccgttgaagtaggacaaaggcatgtctctacccccacacccctgtgtctagactgggcatggtatttctccatatagaatgggctccatataaaatttgtatattagtgttatgtcttggacccactgctagtgaccttatatattgtctcagtcacaccattatcacctatataaagggagtttagtttgttcttatgcaggttacccatttgtcagacctgagtcagtgatctcttaatagctcgggtcagctggttctgtgagtttccccatcatggtcttgactcctttgttcatatatttgctcctccctcactttgattgtactccaggaacatggcccattggttagttgtggatttctgcatctgcttccatctgtttctggaagagcgttcaagcttctctggggttatggattgtaggctgggtattttttgctttatttgtggtatccacttatgtatcagtaatactgtatttgtcattctggttttgggttacctaacttaggatggttttttctagttctgcccatttgcctgtgaattttaggatgtcattgtttcttactgctgagtagtactccattgtgtaaatgtatccaatttttttttatccattattcaattgagggacatctaggctgtttccaagatctggctattacaaataatgttcctatgaacatagttgagcaaatgtttttgtggtgtgaatgtgcctccttccttcgggtatatgcccaacagtggtattgcagggtcttgaggtaggttgatccctaattttctgaggaaccaccacactgatatccacagcagctgtacacgtttgcactttcaccagcatctccagcataagctgtctttggtgttttttattttagccattctgatcagtgtaaggtagaatctcagagtggttttgatttgcatttccctgatgactaaggatgttgaacatttccttaagtgcctttccaccatttgagattgttctgttgagaattctctatttagatctgtaactcatttttattgaattatttggcaatttgctttctagtttcttgagttctttgtatattttggacaccagtcctctgtcagatgtggggttggtgaagaacttttcccattctgtagggggcgcattttgtcttgttgaccatgttctttgctttacagacacttctcagtttcaggggttcccatttattaattgttgctctcagagtctgtgctactggtgttctatttaggaagtggtctcctgtgcctagctacatctgattttaaggaggagggaaacacaatcctgtcctcttaaggaggaacagcagaaatttgggtgagtgacactttaacaatattaggaatatattaggaataaaggtacaaagtaacaagaatagtttcattggatgtatataccatcatgcatcatttaattactgaaatatggcattatctggtcccattgtcctatgaatattctatagtattcttagacaaacctagacttagacttcctagtgtacttatttttaatgtattttctttctatactattttgatttttaaaagctaaaatgcaaaaccacactatcccaggcctagacaaggtcaatttaatatcaacatctaccactgtgacctacttactgttctcatggaaggctgataggtgaataacatgtataacattcactgtctccactgccaacagtgccttctcctagattaactcctgaaaatcctgcttaatgttgttttacagttaacttttgattaataagtagttttcagtatagtaacaataataatatattatagcagttttataatccatgaatagccacttcttatgtattttacatccttgtatttgtcgttttttcatacaagtaggattataataggttttcttttatatcaagattaccacaaacattagcaatacattatattttatatacctaggtgataagttttctagtctattacagtcttactttccttttttcttttggtttgatttttgccagagcttctctcttagccctggctctccaggaagtcactttgtagatctggctgacctagaactcagagacctgcctgcctctgcctcctaagtgctggaattagaggtatacatcaccactgcttggccctttatagtcataatgggatcaccattatatatttagggtatccttgacagacctgttagacagtatgagacctacataaaatttttaataatttttttcttggaagtgtataaattacaagtgtgtgtgtgtgtgtgtgtgtgtgtgtgtgtgtgtgtgtgtgtgtcatctacttgtgtacttgtgtatatgcatgtgcatgtatttagtcttactatgtagcccagttatgctagtcctttctttgtagcgcagcttagattatagatatgtatcacaatgcctggtgaggcatttgtcttttacattataccctgacatatgctttacttttgaacattcacatattactttcatagctaaaatacaattgtttccttactgcctcatgtatactttggtaagaggtcatagcaaatactattacagtttaattgaggtgggatggtttgtaatatatatcaaatacagaagtaactaatgtaacaatgagtggtgtgtacagggtctactaagtgaatttttgaagtatgattatcaatgtgaaatttaataagtaaaataattctttttatgtgtgtgtatgaggtgtgtgtatgtgtgtgtgtgtgtgtgagagagagagagagagagagagagagagagagagagagagagagagatgatgatgatgatgatgatgatgatgatgatgatgatgatgatgatgatgatgatgatgatgatgatgatgatgatgatgatgagtatcaaagcaagggactcagacatgctgggcaagcattctaccactgagatacatcccatttcaagctcaatgctgaagggtgaaaaatggtagaagaggttaatatgccaaagtttcctagtaacaaaacttctgggtagttaattgaaaagcctgtatgagcagaccacagaaatatttttatatcactttgtacttggatagtaatatgacatgtagcataatatatttctgaataaatatttgcgatctttgcctgaccttataaatttgttcctggcagttattccagagcttttcttagctcagaagttttagttttcgtacttcttggagagtaaagtattaaatgatttttaaatgataatgttagaagttttatttaactgttcttctcaagttactttgatagaaatatagacatatggttgtttataacctgcaaataattggagaagtattcttgtcggtagagatcaccgtcctctaacatttttctgtagtgtcttagatatatacacttgttttccttggtattttattttttatttgttgaatacaaattgggttgtatcatgaagaagtattttgaaataggtgtcatcgtcttccactcctcaagcttctagttattttgggttttcttttaatagctgcttgtgcataattaatgtttaagaaaatgaccacacattgatgtccacatacacatcaaaatcaacatagtgaaaaaaactcatacacaggtttccagattctcttgaaaaattacattacttatttatcttgtagttttctatgtgtacatgctcgtgtgggtgcggatgaacatgtgctatttatgcaggtaggtgtcagagcaaaccttcagggagttaattcgtgtcttccacaatgtgtataaggaataaaaatctcaagatatctttatatcaaggaaatttacattttactgctttgctctgctgagaaatagatgtgacacttcagttgtacattaaaatgtactcttgagaaagaaaaaggaaaagaagttttataaatatagtcttgagaaaactgatacaattcagagcatatatcccagaaattaagagaaataaaacatgattatgaataattattacatggtaggctcgacgtgcttttactgtacaaagtgatttcatgcgctccacaatgagtctctgaaacaaagaacatggtctctcctctcttttgtggctcctgggggaggctgcacaactgcattaaaacccctaaagattgctgttttgcatggaaattcatgtttgatggttttttttactttccctatgagaagcagctaagggaatttggtaatcacactttccttatcttatcaggtctaaagttaaatcagaaagatctatagaaggatttctgttgtacaagaaaggtggtgtgcaaacacagtacctgatcagcgagctagattttgtaattgctccactgttgttgatgatgacatcttacccatggctatggtaaagaccttgagagccaggcagcaatttatgctctaaattcttgcctggtagggttgtataatctaatgatttagcaaatttttggtatcaagagtttacggtactcataaaatgctgtttggatatggaatgaattttctcttgataaatgaccattctcaaaggcatattgatttccatataattatatagctacttatactttagtttattagcaaaaccgtctcagattttgcataatttaatgaatataattaatgactaactattcttcttttctctgataggctaagtaatcaggctgacctagactaattcttcatactcattacagagcaggaagggaggaacggcaaagtgttattttgcatgatagctctgtttttctcaacttcctattacagacattattaattttatttgaagcagtattaaaggtatatttaaagtaagggatagagatattataggtaaaactgagaaaaaataaaatacacatatgtgatgtatccttttccttacattttcttacatgccaaaataaagtaatttctctgagacgatattaattagtattttaggcattttccattttacctttaattactttttaatttaattaggtaaatgtggatatgaaaatgtgaagtatcaggcatgttaggcaatgacagatttccaaatgacctttatacatatcttcacagtttaacatgtttacatattattacatcctgattggtgtgtgtgtgtttgtgtgtgtgtgtgtgtgtgtgtgtgtgtgtgtgtgtgtgtgtgtgtgtgtgtgtatctgaaagagcagctacaaacttccaggtaaaataatgagtcctcaggtttggacaaagtacagaaagaaacccaacaaatatttaatcattgtaactccttatggattggacctgagttcaaatctcccagatttacatgaaaggctagacatgactacatgtaaaaacaaataagcaattaatttcttaatggagagaagcagagtttttaatttctcttacactgatatagtgtgcccagaagtatcagctgctttaaattttgattacatttctttaaataaaatgaggaatggactttggttataaaattctatgctacttttaagaacgaatgaaacttagtcatacacacacatttcaggttagtttttgaaaatttcagaaatgtatacaaactatttattccccttcaactcttccctggccaccaccctccaccccacatcctgttcccaagttcagttcttcttttatcattatgtatacattgttctgatgtggttactgggaattgaactcagggcctctggaagggcagttaatgttcttatcctctgagccgtctctccagccaccccaaggtcatctgttttttaagtttggtaattttgttttttttttttttttaactttacacatgaccactggatctacgtcacttcaacctctactccaactcctcctgtgtcccgactttcaaattaatgaatgaattcttttattattactgttacatacagaaatacatacatatatatgtatatatatacagatatatatatatatatatatgtacacacatacatatacatgtatacactcacacatatataatatatatacacacacctatagctaagacaatttggagttcccaagcctctccctcctgcctggctactatataaacccccttctctctcttctctgagtctctccttctctgttcttgtcactgatgctgctgtttcagaaagaaggaggggcccgtgttaacttgagtccacttatttttttcttgtatgtacatgtatacaagtttgaccacttggaattggacagcctatgtgggagctacttcttgaaggagactgattctccatttccaagcaggcattcaacacaagtagatcaacatctaggggtagaatgatgtggaatttccctgtccatattggcaagtcaactggtattgtcatggtggtcttgttcaggtaatcatattattgagagggaagctgtacctgtgaactctcaatttcttcctggttcctttttcttttactttttttttttataactcattgtgtctaattagtgctgcagctcatatactcatgggtgtgtgccatccacttcagcattgtcaacttaccagggaccacacccataaataaaattgactcacttctctcaagaccatctgccaatatttcagatagggccgggtcttgggtatccctcctcaatgcatgctgtaatgttagttttgtgtaagcaaacacagatgatttgggaattcatgagttcaatacccctgtcatatttagaagaattttttcctctagtcttccctgaactctgtcttttccttcagtgatattccttgattattgcgggtagaaggacatatacctagaataattgtgttaattggaaaagatcattgtcagtacatcaaaactgtgaccattcttagattttgtatgcatgatttttaaactttgttttctacaatacaaatacaatatatgttaagccccaaaccacaaacctgaatcataaccttgagatccactctaatgcaaaaatagagtctttattcgcaagttaacacgggtccctccttctttctgaaacagcagcagcagtgacaagaacagagaaggagagactcagagaagagagagaagggggtttatatagtagccaggcaggagggagaggcttgggaactccaaattgtcttagctataggtttgggatttgctcaagccctccaaaattgcatagttacagccttgggattggctgaagccttccaaaactgcatagttacaaccttgggattggctcaaacccgggtatctggactgggctggttggctgcactgcgtctagggaaaattgcaacattgttgtctcataaggcaggcacctggagttgtttactcatttctgattggcctcttccttgtggtgaggtgttgctggtttctggtgggcctccatgggctagggtcagtggaaagatagggacagtcaggcttgacagattggaagaggctgcttcctgctaaagtcagggggacagggggacacctcaaccaggggctactactttcttagattaaacatctatggggagtgttgctcccacactagagtgtactacttccctaagctggggtcaggaaagggtatgcctctagacttgaggttactattcccctatctccctgggctggaacgttcacacccataggctgagggtaactactttactgctcagggattggttgattttccctgctcaaggattggctggttttctgtcaggagcaaaaatggctgtagtttcagggccaaactgtgtttctttctgtggttctttttagctgttaggctccaattttagggcctgggagaatttttttacaggttccgattctaggggcaaagtttattcttttagagttagtttcagagatggggtgtttttccctggcgctagatttgcaaataaagtgcctctttctttggctcaggcccggaatctaggatgtgtttcttttactcggttgaggctctggggctagccattcaggaacagtgtagagtctaaggatcagggatttgctgggacctgggtctcatatattttcctactgatcattaattcttatcaggcaccatgctactactatttcacatgctcctatttaccagattccctcattatgtgcctggcagtagacactataatcttcaactttcaagttgggggattctgactgcgaatttaagtaagctacccagttagttcctctgtggtgagcttggggcttattttgaactcaagtaatgtttctgttgagtacttgtgctggtagtaaatcttgatctttggagtgtggaaataatctttgggaatagcaaaattttttggctttacatttgataaatgagcgaattgatcatgccctgcccttaaaatataaagcaatgagatgtatatttggataaactatccccggagataatttcttcatccaaaaaaggcttttcaaaaactgtttcagcagtggcaacgtaattatagtaagtacattgcccctgagataactgtggtagacagcacaactttgaaagattaaggtctgtttgttcacaagcaaaataggcttcttattttatactcagattttgtgatggcagagtaaataactttcgtgtcattatctaattgtatacattgttttaagagatagaaatattgtagtagagtacaaaaccacaccatttctgttagtgtgcaacgtttgatcatttctaagggaaaattacaaaactatttagctcacctcagtttctatagcacagcctctaaagtctcatttctttaacagggccttgtgggtgttctaaaggaatgattgaaatgaaaagaaatgagagagtcaaacagtgtactgtaatagatgaaatggaaagtaattatgttaatgttgactcattatgaagccctaaccgtttgtacctgctcatttctgtgtggaaacctgtgcagctgagatgctgaataagaaattcttgtataaatgagcctagaggcatgtttctaatattggagctaagcctatgcagaattgtaatgaatttccctaagtcagtgtttaaatgtgctatcagagaatgtgcttctcttgacagaaaatttggattctactgtttaccatcaaaattttacctctgtgtttgaatcctaatagctgaatataactatcatttgtaaattgggaggagagaaaaattctcaaattgcacaatatatctgtattatatgcagtgtcagtgtcagattttctaagatatgctcatgtagacatacttcagataaattatacagaagagatgtatgagataaagttagcagggcaaaaggatgcaggtgagtataactttgcaaatatgtatcctggaccccttcataaggaagcagttgtaaattactcaagcaatttgaccacagggtgtctggtgtgtttgtgtgtgtgtgtgtgtgtgtgtgtgtgtgtgtgtgtgtgtgtgtgtgtgtgtagaagttatatctatttacatctttgatgatatatgtggtgcttaagaacatggcatttggggttgagccaactagatttaaactgtttgagtccagtactgaagcttttgttcagtgttagagaattattgtgtccattccctaaatgcttcagtctccccattgtacatgaatgtttctcccttcctataacatgttgtgcaagcatttgcctttcagctatagcttagtattaaatgtccttaccttttataattcaaacgagtcctgtctttattccagacataaagtattataggatctctgtgagttgttaccctgccaattctggtttagttacaattgagaaaatggtacattgctatttgtaatttaaagagacttaattttacctctgtgccagggagtatcttcaaaaacagtgaaattactaaaacaacgagacacctgatttttgtcaaattaggttcaccattaacttgagattttaattgcagcaaagaatattttactttgggcatgaacttttctttcttcttgtcagtccaaatgcttttaagtaatccacttaaatttaattttctcaaaatgagtgttgatgctgataatattcttttgcatgtagaggtaattaatatcaggttggtattcagtgtcactctactttgtttggatatctgcttttagatttttgcattactccgacaaagatgcaagacctatttagactttaacagtgaagtcttagcatagaatatcctaccagaaggagtgtaaaaatttcatctgcagcagagctgtctaaaagaaatacaatgtaagccacatatgtaatttaaaaatttctagaaaccacatttaagaagtgaaaagaaatatccaaagttcattttaataatacggtttatttctatatctagtcaatgtaaaattattgaaaagatacatcacatcattttatactaagtcttcaaaatctgctgtgtatcttatatttatagcacatttcaattccagccttgctgcatttcaagtagtaggcttctgcctgtgaccagaggctacctggtttggcagtgtagacctcaagtcctgatttattttctatccccatgttcctgatgaaatgatacactaagaatagtgctagcatccttcctgtggaggagggcatgcttgtctactaaggcattatcagaaaaatcataatttgtcttactgacttcctggttttgtacacgaggaataaagactagattcattaaaggccttttgttttgcaataagttgattctcatggatttctttctattctgaaatttcttttccttttttgcttgctcattttagagatgtaattttcctttgtttcccatgacatgtaagaatggagatcatttatcaaaaatgacaattgtgctgatgttgcttcttggacaatttttatttactatggtgagtgtgtttatgtatgtgtgagtccaacttgtgtgtggtggaacaaaggtcaggggacaggtttccagagttgcttcttcacttctgttgtgaaatctgaggattgactctaggttctgtatgaggtttgtgcatcaagcactttttacctgctgaaatattttgccatccctgtgttgtttcttttagtaaatatctgaagctcctgttatagtttggagagaggttgagagtgttcaccagtgattcatgtgcagtagccatggtcctcagcatggttatcctggaaagttgtagtgacatatataagaggaggaccttaggacatttgagtacctgctcttataaagaaagttcttttattttaaattaaaaaaatatttttcactttacataccagcaccagttcccccttccttatcttctcccaccccctgcctcccctttctcactcctgccactcctcagagtgtgtaaggccttccttgtggagtcaactaagtctgacatatcaagttgaggcaggaccaagaccctctcccctgtatcaaggccgagcaaggtgtcccccaataggaaatgggctccaaaaagcacattcatgtatccaagataagtcctggtcccactgccagggatccccaaaacagatcaagccacagcactgtcacccacattcagctgtcagtctagtgtctgttatttcccgctagatagggtcagctgtctctgtgatttcccccatgcagctcctgatcccccaaccccttgttcatatgatcccttctctctttcttcagctgatctccaggaactcagcacagcactttgctgtgtgtcactgcatctgcttccatcagttactggatataggttttataataacaattagggtagtcactaatctgattaaaagggaaggcccatttggacagcctctccattgctaggagtcatagcagggtcatccttgtggattcccgattatatctctagcatcaggtttctcccataccccataatggctccctctatcaagatatcttttattgctctctccttccttccctcccccaactgtgtcttgattccttatgtttccatcacccatcccctcccagttaccccctctccccagtttacccaggagatcttaactatttttccctcctggggctcttcatgtgtgtccctcttagactcccctttttacctagtttctctggggttgcagattgtagtcaggttatactttgctttacatctaatgtccacttataagtgaatactttcactcaggatgtttttttctagttccatccatttgcttgcaaatttcaggatgtcatttttttttctcctgagtagtcctccattgtgtaaatgtaccacattttctttacccgttcttcaggtgaagggcatctaagttgtttccagattctggttattataaataatgctgctatgaacttagttgagcacatgtccttgtggtatgattgtacatcctttgggtatatgcccaagaattaaagttcttatggactctagaatgagttctcctcaataccatgttcttacaagagcaagatctctggtttgttttgtcagcatgatgacaccttctcacatgtcttcctgccctgagacctcattggatgctgaaccaaagctacttgatctgtagctttcaattttctttgtaaacatttcctactaggcttaggtatttttacatgaaaatgaaaaatagtcaaatgcaatctctatgttgttgaagccccagtaatcatttaagctacattctcttgaaagttccactaatcacaaccatttgctttgcattttgaacatgaattactcatctaatctcttgatggaaaatcatctcctgtcttctttactgatttacaatactatataggtcttttgcaatgtgtgttctattcatatacatagtcttgccttctactttcgtgctgtttaaaattccctgttaaccttctcatgtgactgttcattaggacaaattgggaaaggacttgggactgaatgaaactggattcttctttcgttgaccttatcctaagaaagagaaaccagagtgccatcctaagcataaatgttattaccttgttgattgtttagtattattttggaacaataagacatagtccttagcagcttagttgtacaatgcatcttttcactatcaccatttgtcctagtattcgtccatactgaacactttccacaacccaggcatttagcactcataatttcctagtgtgctgtaccatttttccagtgttcatcatttcattttttattaactgcccctttccatgatatcctcttaaaggtacagtctcaatcctgcttcacataaagcccctcccttctgttagaatactgtttcttatgtcctcgcaatgcttcttctggtatggatttcttgtatttcctgtggtagttctccatctgttgcttttctgatagtaaatttgtaggctggatataagcatactatattgaacgcagttgcacctttggaaataaatgggaattggttcgggattcctaactgagcagtcccatatgtgaggaaaatgacacatattaaataccaactaggtagtttgtgtacatgatcttatgtagtattggcaataatattctataggttgtggagtgcttccattttagagaggaaatccagctttgtaaagtgattgcattatccatttcgcctacttagtaaatatcatatttcaaattggaatccaagtttgaatgaagaatgcctccttgtatttaaatgtacacatttaaggggaagatatactttggtgggtgtagaaagcaatggtctctgctaactgacagggatgataaactcatgactagtattaaagtataggcacttcttgaaagccctacttcctttcccaaagtttgtattgctgttttcatctttccatgttagtgcgtattaaactttgtaaaagttacgactgatattgtactgataggaaatgtgttttggtaaaagttgactatacaggtaaaaacttgtaaattagcaaaaacaaaaagtggaattacactttcctttttgaaggcagcttggtgattgagaataggctaagagcattgctggcagagaatattaggcatcctcttccagtggatgtgtgaaagcttttgctacttagcatgtcaataatatgtcgactggaaagggttttacaaatatctgagcacatttgaaaaggtatataaaactagcattggattctcaatgcagggagtcctttcatcaccctgtgaggttggttaccagagatttgtgattgaggctgcaagaggctaaatcactttttgaaatgacaacataagtggcagaagagcatttaaatacattcttctctaacttcctgagagcatacaatccttcagatatgccaagtgagtaattttggtattgttcctgtaatatgtcctattccattaattatattatcaggcgtatttcaaaaactagtacaaagatggatttcagaactgttctatcagtaagcagagaagatatatattcacaattcttggtgacacatactaaatgaaaatgcattgtagctatttaaatcaccataagtttttcttttcagttatgttaaagattcacataggtataatggcttattttttcatgaggcaaagtagcttaaatgcagaatttaaagacgtgatcgacattatgacatgtcttaaatagtgttaatattctttgctcagttaatttaatcctttttaaggaagaagactgtatttttgactggcctttagttaaaaggaaattataaacgtcattctaaattaaatctgtgaatagtaaagtatttgttgatatgtgtaatatgaaggctgaatttctagatgtttagttggctttctttgtctagttgctaaccactacactgtttggtggttgcttgatttttatctggattgtagagcatataaactcaaataagactaggagatttctgttgacatgcagttttttcctagggaaatttactgcatactgcagtgggaatactatttcatatcagtgtcctagccctctcttacacacccattcactgcagacactgaatacaatattcagtacacacaagcttaaaagctagcaggttttaacattctagttgtaattctgtggtagttatgaaatatgaaaaataatgttttaagatttattttaaaacactttggtaaggaaaacatatttcctcttagcttgtcattaatctgggtttacatgtgggctggccccacttatcctggaggcagttaatcattaaacatttttagtggcaaaaacctctccttataaaaagatttttgtcttcctgtcataaatttttcatacttctttccagattttaaactagaaaatattgtaaatattatgggatagcattatgatttcctttcaaactgcagtggaagatgccttgttgtaatgtgtcctttatacacagaatattatttattagtcgataatttgtgtcttcagaaatatttaattactcatcactattcaaatatacgctggatacatttcaaattggtgaccgaattaaaataacattggtccttttagcccaacctaaatctaactactaggttgagtaaaatcaagctgttaataaattcaggataatagccaacttggtgggctttgcctttgatagttgggaagtccatgtattgctgaactactagttccaagtacatcagtcaggcatgtatgccaaacctcttcaaaacacattaccagatttattccttttattcaaccatcctgactgggaagaacagaaatggggaatgctccttagagccatcaaggatggattcttggcaggtcttaagctgatcagctgggatgatcttggtttgtcgaaaaaaaaatggaggaatggtttactgaagctgattatgtgttatagttcatcagggcattttgttaaacttgtgcagcagaatgtctgcgtttccccctatgtgatagaaacagcaaatggcaggctctcactcaagaatcagtagtgggtgtgttctcagaagccaagggaagtgtctcagcccttaattgtccttagggaagaagtttattgattctatccttgtctttagataagcacatcacagcatacattatccagactggtagtgccacaggctgcctggagccctaatggagaacatgtgtctgacttgttgtcatatatcaaagaaggacaactatctggcagtgcaccatggggtctatccaggactatgtctccaggaaggctccatgttccttcagtgagaggatatagtcattcaaggtgtttcacctgatctttcccaaaatgtcaggtgggatgccttgagccacctcaagttcctctattactgtacactgggttatgtcttctgtgcccctctgcttccatgaggactcattggaccatcattgtcttcaactggtgtcctccagtatacacatagctatgattgtcagggccactcaggccatggtgttgccagaatgaagcagctgaagttggcgctgtctcaggtggaacagacactacatgcaccaatgtgggagactggaaggctggaatgctgcaggaacccactcaggtggcagcttatggctagctttttggcatatataccaaacccataggaaagacaaacttgctagctacacacatgggagaaaccaaaatttcttcttgatgagatgactcacaattatcccatctttctcttttaaagccagtaaactagaaattattgcttatgtggaaagttgtgcctttagcattcatagtacggacctggatatggcaaggatgtttcttatatttcacctttgtgtttgtactttaattttatttgaaatgaactgtaaagtcaaccagaaatacactttatatttgagtatgggggattcctggtgctggtgaccagcatcagttaatgcatttaagccttgagttttcacagtagcactttatatattctcatttgagtagctttgagtagttatgaagttttcaatattaaccagtttagtttgacactaaagtcagtgtataagcatattcaattctgttaacattcctttagtttttcattttacacatgtaacaaagcaagcagtgatgaaatattcaaatcttatttatgttctgcatttaaaaatataggatcttcaatagtgcagatattttctaattatatatttagtgcttttcaatagtattttttaaaagtctaatatgtaaaatgtacacacacatacaaatgcacacacatgtctctggtagtttgactgagaattcacttattgtctcatatatttgaatgcttggctccccagtggaactgtttgagacggattaggaggtgaagctttgttggaggagatgtgtcactgggagtgagctttgacctttcaaaaatccactacaggcctagtgtcacactgtttgctgatcaggatgcaaatctctcagctactgcaccaacaccatgccagccagcatgctgccatgatccccaccctgatgataattaactaacactcttgacactgtgaacaagcccccaattaaatgctttcttttattataagagttgcccttgctcatggcgtctcctcacagcaacaaaacaataactaagacaacttaaccatattggcacctgtatttaaataccctgaaatctgtgtggaatcacaattgacttgatatagcaaacttgacttctgcaaaatagtacattttgctcttaagctggacagttcttgtgattgctaaaatgttcaggtccagtggaattataaaaatgctactaagccatcattgagagagaattttctatcgtagttgtagctcttatatcctttgtcttgtccttcctttggtgccgccctcctacctctatggttttctgatgcttcttttgtgtgtggaaaggtaatctatacagataagtcttacaggaggagccacatagttagttccaaataataaagaaaagtgcttatatggaaaaaaattagatttccatataggcccagaggagtagatacaatcaaggggtaattatatgagatacatttcatatcagtaaaagaattaagtaaatgattgctagtctactatgccttgattctcgactgactgccttaaacaacactgaatggagttaaagcaaggcactgaagaatagtaacaaaaatatgtgacctttggaaattgacagatctatgtcacatttttgactctattttatttaaatttcagttaaaatattgtattataatttcacacatgtttaccataaataataatcactctcatctcccacctctctactactccattttcccctttcctccccccagctctctttctaacattcatatttcatgatttttgttgagtgacccaccaagattaaccagggccacctatgtgactatggatgtggagctgtctatcagagactagtgggctcagcagaaggatacacagctaaagtctgtgttttcctcccttcccagaatctatctatagccattagttcagagttaaagggtagggaccgccccccttccaccttgatttattgttaataggcctggttttgtgagaatccagtgcagataactatagctgatgtaacacaaataataaaaatccattcagatattatggttcaagatgaagatcagagaagcaaagaagccagcttttacctccatctgaggctgaaagggctgatctggctccaggattcctcagaggcaaatgctcttcctgtctgttaactaaatctccacatgagaccctttgcttcttccttttatacctcctagtgttgggattaaaggcctgtgatcccaagtactgagatcaaaggcatgaactccattactcttcactcttgtgtagaccagggtggccttgaactcagaaggattcatctgcctatctcctgagtcctgggattaaaggtgtgtgccatcactgcctggctctgtagcttgctagtatggctgctgagattaaaggtgtgtattaccacttcctgcctctatagcttgtggctagctttgcattctgaaccttcaggcaagctttagtaagtcataaataatatattatcccaagatgatgttaattaataattacgatagctgtatgaagtctagggaatgatagttcttagtccatatctagatcttctaacacttaaacacttccaacttccttttccttaatgcttcctttgtctctacttcttaataattgtgtggctactagtgattcacttttgcctccctgtctctaatgttggtgacaatgcttatcttgcaggttgatataaaagtaaatacaatgtgcataaaactcctttacaaagtggttcacacatgtagttactcactgaatagcaggccctggcttttattttatgcactttatgagtaatcaaatacttaaagttaggtaagttgtgctattcttaaccatttatctcatggatattcttttgtattacttttagaaatatatggtttaaatgttttgcaaatgccacctttaccccttgcatctagtagatgacagattacaggagagtttggtttatataactctccaaggtacatagtgagacattgttaaaataaaacaataacaaaaacatgtggatgacttattgttaccctcctctctcatcatggtatggtatgaagttagtaacttaaggagagaaaacaggattgggcccttgttcttccacttctcagtcattttaaatgaaactggtacttaccatatggagatattatttgattttaatggttatgccagatgctattttgtcttcttccactaacctgagatgtataacttgaggctgtgatgcctgtatattggagggcatattccagacctttattttgacaatacctaacaatgtgcacattttatagcagaaaattgtaaaaagattgtgttgaatcaatggataccagctttgagctctttgacaatttgaggcattttgatccttttgaaagtgaattgaccatttactaaaaccagtcaacattaagcttttaaagtaattttcatgtctgcattactgataattcttttggggggaaggtagggaatagagaaagattatgataaatgcttttaccttagcctgcctttttaaagagagtcttaaagggcagagcctcttggttgagagacacttaaatgataaatgatagtgacaacatttgtttttcctcaccagagttttggggatcagagcaagtcagagagactggtatcctaaatcttagcttctttaagtgctaacaactgtcatttgttgttccctgaccatcaaatattttctggaatattatccatttataactatcacttcagataatggctgtttggttttgtataatgtacttttaaaggaattttgttctttttaaatttaaattagaaacaatcttattttacataacaatccccctgctccctctcactcccattttcctatgtcccctgtcaacccctgtcccacatccactcctcagggagggtgaagcctcccatggggaatcttcaaagcctgtcatatcatttgggtcagggcctaggccctcccccatgtatctaggctgagagaatatccctccatagggaatagattcccaaagcctgtttatgcactagggataaatactggttccactgccagaggccccatagactgcccaagcctcccaactgacacccatgttcagggggcttgtttcagtcccatgctgtttccccaactatcagacaggggttcatgaacttccacttgctcagatcagctgtttttgtgggtttgtccagcacggtcttgacccctttgctcatcactcctccctctctgaaactggattccatgagattggctcagtgtttagctgtgggtgtctgcttctgcttccatcagctactgagtgaaggctctagaatggcatttaaggtagtcatcaatctcattatagaggaaggcatttaaagtagcagttccactattgctaggatcttagttggtgtcatccttgtagatctctggatatttctgtagtggcacatttctctttaaacccataatggctccctctattaaggtatctcttttcttgctctcctactctattcttcccttgcctagattaatcttcctgattcctcttgttctcctcccctctcccttcctcctccctccctccccatcaacccatgctcccaatttgctcaggaaatcttgtccttttaaaggaattttaaaagatctttaattttttaaagcatgattgttattctcctaggtttctcacctgtaggggatttcctctgagatgcatattttatgtaatagagtgagcctacacttagtggtgctatcttattttcttcttcagtatttcctttaaacacgatgctttcccccctactctcatttatccactgtctctatttacttacctgttagtttttgaaagaagtacagatatttggtaaaaatttttgttaatatatggtgaagttaccacagcgttggaatacttttggattgaaagttaactactgccccaaactgtctgagtctgtactactttcacttagaacacacaattatccaagagaatacaataacatttctattgcttgatatttaagtattcttttagtgcccgggacacacatacaaatgcagaatatttctttacaaaatggagggatagctcagaaatcaagaatacttgctccccaaaaggtcctttggttccatcacccacatcaggtggctcacatcttcctgtaactccagatctaaggtatctgattccctctactggtcttcacaggcacttgcaatatctgcacatatccacacagaggtgtgattaaaacacatctatcaaataaccagaaaatctctttataaaataatgttatacatcatgaactcatatatgacattttctcattttctacttcagctcttccagtgaaataacacagaaaaaaactgtacctagggattttgtgttaatttcattattggagtttgtatttactaatttttaacaagattcttcttgtgtaataactaatatatccatctggatcaaatacttttaatgttttatattacattatattactattaaatgtattagtattatatattatatatagtattgttatgttgtataattagtatatatagtagtattataatgttacataatacacttccatcagtttgatcttctatcttagaaaaatgtgccatcatatttattaacagatacagtttacaaaagtttagttagataataataatagtagttacttttgatgctcatttactatgaaataaacattgttctaattgttttgcttaatttacttgtcagaacattccaaagaaggtgttttctctaaaccaaagaagggagaatttaagcaattttctccagattacatagctgcctaggtgatctcgtctaggtataatttctggaatccattccttaacttcatgtgaccgatccattaatcttactagaattgttttaagaagtgtttgtcttgtagttaagtgactttttgagtatatattcatgatcagattacagaaatgatgttgaatctattacttttaggggtttctcagagcttctatgaactttgagttgtctcatcttcttgacatgattgggaaacattttctttctatcaaaattgttccttgtacagctgtagggaactgggattctaagtgagctctgttgtgagaaaggtagagaggaaagttaacatacttgcctgagttgtttctcctaaagaatagaaattctgatggattaagtctagaagtaggttgggagagaatctccaaatgcctagagatctgactcctcaccattttcatttttttttctgccaacacatccaatatagtttcattgaatgtgctttacgtcatccctaaatcattcctgatacaagtactacatttggttcattatcctctagtgaattatgtgtttgataaattgacatttctgtaactgttcctggagagttttgactgcacaggagttccaatgcaaatggaagatgcagttttgccagtaacagatattaggttttttaaaaaaagcttgctttaattaattgttcacatcgaaaaacccatggatgaccagtgttgtcttgtgcaaaagataaagaggggtcaagttttttattaaagtacttgtaaagtctttacaccatgctgactgagcctagccaccggataggacccccaaaacaacacacagagacttgtagggtacaatgctgcaggccaatgatcaggatttcttatctgctagctcagtcttaattatcaaccataatcataagacttatcttatggaggacgccggtagtaagtgccctctcttggcggcggatcacgtggtgtctctagagcagagaagagagcaggaggaagagtagttactacatttcccaaaatcctctttgagtcctagtcctgcctaactctcttcttcattggccaacagtactttattcaacaaccaataaggatataaacatacacagaaagacattccccatcaagtactttttggattttttgtgtgtaacaagattttattaaagtactttgtctgttagcctttgtatttccagtaaggcatcctgaatacattcattttacttgaattattttagtttttatacttttaaggtttgagaaggtaagaatgacgatgaaacagtactgtaggtaatttgctgatggctcatgcatttatatttttcttacacttggaaggtttgtttatttttcaagacatggtttctctgtgtaacagcactggctgtcctggaacttgagttttagaccaggctgccctcaatctccgagagattcccatgtctctgcctcctgagtgctggtattaaaggtgggtgccaccttacctggttttggaacagtttttataagtaattgttataggaaaatctaaataggcgttattatagacacaaattaacttgttataagcttaaattgtaatattagagtatttattttatatattagagtattacataataacaagtcataatctatactcttgtccatcatcaagcttgattttaggtattttttttagtttttttcattttagacagtgttctattactgtgaaatgacagttgcttatagttttggatgtttagtccagtattgttatgttgagaagcatggcagcacacaggcagacatggtgctggataacaacctaagagttcttcgtctggatcttcaggcaggagagagagggagagagagatagagagagagagagagacagagagagacagagacagagagagagacagagacacagacagagagactgagactggcttgggtttttgaaactgaaagcccacccctgactgacatatttcctccaataaggccacacctactctaataatgccacatgtcctaaacctttcaaatagtgccacccctaagcattcaaatatatgagcttatggggccattcttattcaaaccaacacagttcataaacttagcaggcctataaggactatagagtttttctcccaattatcacattggaactattgttagagaatttgccatttcccattaatttattcatgtatattcattccaaaaatactttaccccattaacatccaagtcttactactctctattgtaggatttcactttccagaaataactgtaaaactttcttcagtattatgaacctactactactcagcctgtcatgaaacatttatttttgctatttctctaagtatgtatgccattgaggcttgtttaattgcaattaagaatatagcattttcttggttctttattttgaaagctcttctgctttgtgatgtttaataggataagtcattcacacatatgatacttcacatattctagatttaaatgtttagtgcttacttttgacaacttagtaaagatttctgttctagctccatagatttatttttgaagttgaaaaattgtgcttttaaaatgattatgagaaacttcagcttgcatagtggtatacaagaatgaatacgttacttgtgtcaccttatgtgatatatgaaaataataggcgaaacagtattgataaaattctgtttagccctatgctcttactcattttaatccacagctaagactttccactggtaatagatactttctcttcatcacaaattggagattctaataacattgcacaaaggataggtatagaaaccacaaccaacaacaaaaaacccaaatagcctcattcatcttttaaccagttaaaggaaatgaggtaaaatgtacaaaatgcataaaaacacacaaaaacccctcaaaccttatttgccttgtctagccaagcttgttgtgttatggattttatgtggcaaacttgaaatggaatgtttttagttaaaaaaacaaaaagatgaaagtctgaaacaaccaactggcaggcttagaatacaatcatgtttttagcctacctaggtaaaaaggaggtatgaagtgactacttaatagcagcttttgtttctttaaatctgggtttcttaactctgaaattatgaacctcatttatgttttagtctgtattttaaatttcttccatgtgtttttattagtctttctcgccactgtttaagatagctttctcagataattagaatttttattttttcctcagcttttctctgaaatgctggtagagcatgacttattttctcatttaatcagttagtgaaactataatgtaattaaactcatgatggaacatgttttatccaaatttgaactgatagctaaggctctaactttggctttaaaacctcaaaatatttccattttaatattcttcaaattaggcttgtgtcatgttttgtaacatatgacaacaagggctatgtggctttctctgctataaataaatatgttgcatattgaaacagaataaattttcgtatattcatttaccaagtatgtattttattgaatattggatgaacagactgctcaaaataagaatggttagtctttgttctcaggatgatagggagtcagatataaaccaatattcattttaattatcctaagtgcttaaaggagacatccaggagattatagagaactcatttgggaggacagggaaggcttccctgaggaagtgatatttaagctgaatctttaatgatgagtaaagattagacaagtaaagaaagtacaaaaattttttcagtgtgggcaaattagagcttaatgttttaaaaatatatgtgaagaatctgagaagggagataaaaatcagagctaaggatttaaattgttcaaacattacaagctttagaacaccatggaaatacttgaaatacgacaattttagaacatgtctacaaattaaccttaatctagatttttttaaatggtttggaaataacacacagatgcagactgtctgcaactggtatgttgggaaagaaacacaacaagcaaatgggcagactgatgaaaaacaaatatagaacaaaagcaaatccattaacatatttttgtgtggatggtagggaagaagagttcaaatagggaaagatatttggaatcattttgcctatttcaaaaagtcctttcatgagatacctactcccacttgtcctttaataagccactagcagagactcagtgtctaatatgttgatcccactcattcagaattcagtgtttctttcataatattcacctaatatgcaccaaagtacaatgtgtgtttcagaacatttaaaaatagaattcaagatgtttccttttactctagtgcttatttaactatgatgacatgtctttaaagtttatggtagtgtttaagtagtagagtcttcactagttggatttatatacttcagaataattaattatttattcttcttaatgttaagtgaaagacaagaacgtgttaagatgcagagaggggaatgcataataagctttctgcttttccaaaactgcctgtagctgctactcattctttctgctagtatgcatctctctggtgtgcagcattggggcaatagccatgagaaacaaaaacaagagtctttgtatttgaattttcaatatttccagtgaaatgaaaggtatgcgcattgtcacgagacaatgaactggaagctgcacatatccttttgaattcaggattgttttggtttggttttgtttttaaattaaggcgagattgaagagacttgccttgctatttcatttcggatgcattgtacatgagtataatgcgaatgctctttgagagcatatgctatagaacttgttgaaacttctgcaagttcttttacatcatttacagctgtaaattatttcatgcttacagcaaggaggtgaacactccagaataataatcagctacctatttacaagaatgttgagaagctccaagtactgcttgcacaaaataatagactagtttcattgtagtagtgaaagttccaaagcaatttctagacatattatctattgagacagttaaaatacatttatatttcatttctaaaatatttcccactatgtatgtaagatgtctcaggaaaattttaatgtatttcattgataccaaaaatactaatcttaaatacacacacacacacacacacacacacacacacacacacacacacacacacacacaatctaccgagtacatgtagctcatatgtgcatgtgttcaaggatgaccacttgggattggacaaactatgtagggactagtgcctggcagagacacctatagctattgagatttattaccaaaatgaaacatacaactgcagtgtcactgatacttcaatttctgtttccgtatgaaggttaattctaacaaccaagaaaaaaaaaaaaacatttcagcaggaatagaagctcaattttttttctaatttttttcagctgaaggtgataattctgaaagttaggaggataaaatcaatagacagctgtatacctacatgttcattaatgaaatgagaaggtaccgatggcatttctttccaacagtaatgtgttgcagaacagtgaaaagagcacattaataatgttagcaagatacaaattgatcagaggaaataagtagagatttataaatctatatgaatttcatgcattatgaaagctgaagaaatacactgatgaacagagtacaattttagaagagatgagatagactatagatatttacaatttctctaaatttttccannnnnnnnnnnnnntatttcaattattgaatttaacaaaattttcttatatatgaaaagttataacatacaagaatatggaatgccattgagagaaccaaggttaacatttttaatgaagaaataataaaatgctaataaaataatacatgaaaactaatacacaaatatatacacatatactaaagagtgtatacattcatgtaaaaatgaaagtaaaaagtctagtagattaattttaaatatataattacagcataaactatgctttttgttaaggacataaaataatgcaaaatagataagcattgcaatcctccctctttgtctgatgattttacatggtaaaatatttccaaaatttagcatctcttctctcagtggttaggattaaagggtttgaaatctttattgtttgaagaagtcaacagattgtacctgattttaattgaaaaacatgtcttcttttccttccttccttccttccttccttccttccttccttcctttctttctttcatttctttctatctttctttctttttcccaccattctttttttcttttctatattttgctgtactatcttgtgtcttatgttgttactcattttattctttcacttgttacctgttttattttcaccttatacccacacatgtatgtaagtttctggaattctgtgtatcctcaagtataaaaatttggcttttttgttgtttgcttgttttgttttcttttgaaactgagtctccctgtttaaccctggctgaacttgaactcactgtgtagaccgggctgtcctgaagccaacaaagatcgcttgcctctccctcccaagtaacataaataaatgtgtacaacactatgcccttctatgtatcaactattttaatctacacaattaattcttatgtaacttatattgaaggcagttagtacaaaatgtagacttttttacatgtggaatctctctctctctctctctctctctctctctctctctctctctctctctctgtgtgtgtgtgtgtgtgtgtaggtatatttctctgtgataatttaccatattttgttactactaataacaataaatgtgctatttttccaaactaaaaagttgctgtgtaagttctgaacctttgtgtttttgacagctaactcactcctttcaagaataagtgagcttcaagtgccttttaggataatgaaaagtaccaaagatatcagagttaaaagtctaatggataggacactggattagaaattgaatgccccaggttccattctcagcttcctatgtttctgtgtattattgcaaaatctgattaaagaatttgttaaatatgtaaaatggggctaatacatcttatattactggaaagctactgggaataatgagaatttttaaagataatacatttttgttttttaagacagttcttatataagggacatgatctaaattctatctgaaatttgaatgttagcaaatattataatgccataacttttattccatagtttaataataacccgatacatttgttgccttttttgtgcaaatacatcaaagacctatatttaagttatgaactattagcttctgttttagtcctcttactttacaagtattcaatttcttacatattatattatattttgagaaggaccagcaggtatttaaaaaattaactatgtgttaccatggcatttaaaaataatactaaagtgtttgcctttatgatttgctctatttccattggaaaataggggcagtggagcaatggcaaaaataaattaaccttattacttgaattaattgtaaaaaaaaaacttcacaaaatatcggcaagttctcacttttttatctatgatgattaactttattgggaaaatgtcattctcaacaggggtgatagtttgtgtttgttatcccagcgcttgaggaactgagaaaggaagatttgtgagttgtaggtcagcatggtatatagaaggagccctggtatcaaaataccaaagccaaggtaatgaacaaatatacaaatgacgggcaaataatgttcttagcctcttgaaaattatgatgtgtgtccttcttatcttcatttacccagcatttagctcatagatgatccttaggaatatttatttggcaaataacttcactcgctgagataaaaaaataaaagcaatacataagtgctatttgctgccatgaaaatgaatgtgtcataagagttgagagcttctttgaaatcattataaatgaatcatctcttatatgtacaaggtattttcataaggattcaggacatttactgttgtttactcctcaaattttggcatagaagccgtattttagtccgtattcagtacattagattggttctcttttgtggaccaagacttgtgctttgcataaattacacaagtagtaattttctggagaaagaatagtatttcaccttttataatttgctttaatctcacatactgtccctttgttttttgttaaattatgtcaatttttaacattttatgaaatagtgtttccagtgaatggtttgcaatgttttagattagttgaaaaaacttgttggcatatttagcagtaatgatgcatagcattttgtttgaattgctacaaattagctggaagatgtgcatctgtaaatttagtaattttaaaatacatctcaaaaatggatctccttattgaaatctttatgtttcagtaaatgagcattctaatgggaacaatagtctaccccggagaagagcacaccaattgattgtccaataccaaatagtcatacctgaaaacatgtgtgtgtgtgtgtgtgtgtgtgtgtgtgtgtgtgtgtnnnnnnnnnnnnnnnnnnnnnnnnnnnnnnnnnnnnnnnnnnnnnnnnnnnnnnnnnnnnnnnnnnnnnnnnnnnnnnnnnnnnnnnnnnnnnnnnnnnnacacacacacacacacacacacacacacacacacacacacacagtttaagggaaagatgccatgaatttgaaagaaggctggttagaaagaaggctggttagaaatgtcaggatagtgcattaacctactgtgcttcagatgttctactattttttcttgtcttgttatatttaaagtatatggtaatggcagcagaacagtttaactgatgtcagatttgggcagtatatatttttttacattttctatagtgtaaacatccacttaaaatataagatgcatagcaaatatttgataagtttgaacttctatcactttctgaagtaatttataaagagtttatatgtataaattattgaagatacttaacttccatatctttacatagtagaaaaagtcttttaagaatgtatatgcatttgttgtgttttagattaccttaattttgtctttgaaaaagacacactaaggcataattaatagaatgtgacctatgaaatattagttctattattattttgaggaaatgagactgtgttgtcttatgttcagatccacagtagacatgtttagatgtaacaatgctaaaagcagaaagacatggttggtaatctataaaactaattccattatattggcaatgctacactgctgtttatgttgacatatttgtcttactctaacatctataccatttatgggtgagaacattataaaaactacaaagcttttatgcttaattactagttcagtattcttactaggtcattctttcaagtcaggttgagatttgaggcaagcaggtttttgtgatactcattgagtactagttgagaagtttaattggttctcatgcaatagggatgaattatttatctcagaagcttgaagaacttctaaattccttacttctctagggaataaatacaaatgtttgaatgtgttaagtaaattcagtttactgaaatgaagcctaaagacccattttctacatattcttaaaatttacatatgctaacctaaataagtctgcttcttttaaacactagtgagaacattatgccactattaatgcccatttatttaatttaacctgggcatttagggaccagttgattgtattctgagttagtcccacattttacagtgtagtaatgttttgagagatcagctcacatacagagaaaactgagtagtcagttgcacccagggaaatgaaagtgccctcctctacacatgtattcactattgcctactcatgaaataccttttgctctgtctttacccccgttgtttctcaatgtatgtcctacttacagattcttgctttcagatttattcatttatttaatttagacaaaagggttctttttattggatatatttgtgtgtttgcctgcatttatgtatgtgcactacatgaatgcctggttcccatggaaggcagaggaaggcattggatcccttggaactagagttagaactgttatgtgacttccaagaactgaagccaggtctctgaaatgacagcaaatgctcttaaacccatgaacgaactatctatctgtctgtctgtctgtctgtctgtctgtctgtctatctatctatctatctatctatctatctatctatctatctagttttgaggcacaatctcattatgtaaacctaggtggccttgacatgactatgtagaccactgtaacttcaaattcatagagatctgtctgcctctgcctcctgagtgcaggtatcaaaggaatgtgtctccatgcttgtcctcaagttcatttgtttttttttacatcagcatataaaaatgttgtgtattcatagtgtacattatgatgtcctgcaacacatgtgattaaatgtagctaatttacaaatgcattaactcacagttattgtagtaaaaacacagatctcctagaatttctcaaagatatattctaaactgtagttgaccatgtcctacagtagatttcttgaacctactccccctgtctctctgtagacatgtattatatttaattaatatctctccaatccctcactcccaagtaccttagcctgtggtaactcacatcctactctcaatctctatcaaatagctttatattatatacgtaaaggagatcatgcaaattttgtctctctgtgcatgcataatcattttctcttccacattactgcaatttatagaatttcctcctttcatatctcaatgtaacattctattgtgtgtatgaaaattttaaagaatttgatccataatgaatagtttgcctctttaacctggttataaagtgaataatgctgtagtaagtatatgagtacagatatatcattggcatatggatagccattggagatatggactgctgaatcatatgacagtcctatttttacttttttgtgctcttccatactaattttcataattgatgtacaattatattctgaccacagtgtacattggtccctttctttacacttttaacacttaatatttttgataatctctgtgcatacagtgccatataggatgaccccagtggtgccacctgtgtttcctgtgtcatctgcagttaaattttaatgagtacaggcaacatgtggtgatgtcatttgttgtttattttggtacaaatactttttcatactaaggttatttcatcaggattcaataatgaatatttcactttcctggaaaagtattttctttgatacagatataaaaacagagattaggtggctggatttggttagaaggtggttagccaagtaattcagttaatgcttaatgctgtcatcttaagaaaaggaactttggagttttaaaattaccttacccacagcaggaaccattaaaatatgttcaagaattctagtttgagagttattagcccagagttccagtttcattgatgtactagcaaatctccaaacatgctgtgtttgagtttttgtatctctgtgattaacttctgaccaaaatagcttagtctgccttacatgaatagcatttattagtctttgaacttcatccctcaaatagattcattgattctttaaggtctcatcctctaccacatactatgataatctttctgctcattacatagcagaatgtgagctctgttatgacatcattgtgtctcagcttcttactgtttgccatacctgagaatatactccatgcaagtggtaatattctaatataagaaggactgactcccaatgccccatagcagatactttatgttcatgttgttgtttaatgaacacattggaaacctgcgtttaatgcaccagtagagagtaaggtaatcaactcaacttatttcacaaaaaaaaaacaaaattcctgttctaatttacatgctatgaatcacacattcaaattagctgggcctttgagattgtgtggcccagtgtgcttaaaactttattttatttagcatgagacttgctttgctggtagaaatcttcagcagaatataaatatgtaaatgatctcattattaggggaacaaaagacagactttcccagttagccctctctttttcacattccctcctcagccagtcaaggattcctgtggattctcaaaatatacttctaatctcttacctgtgatacaggtccattcctgaatatttcaggaagattagaatcctgcctctacttcaaccatatagttgatcagaagctgataatatttatgccaatgataatgtttcataagttaactgtttgggcattcatgaaaccatgaaattaacgacaaaataacatgtcatgtaagtatatactaattcaatgattactgtatataagtgtcctggttagttttttattgtcgacttgaaacaaccatagtcagctggggagagggaaagccagttgaagatttgcctggatcagattcatgtttgaccaaacctgtgagagtttgtcttgatagattgatgttggggaggtaacacaatcaccactcaggtgggtctgtgctatacaagaatgctagctgagcataactagagaaaaaggcagataacagtgatcctctgtggtttctgggtaaagatcctgccttgatttcctgcccttgcttccctctatgatggagcatgatcagactgtcataagctaaaaataaatcttttcattccaaagttgcgtttggttaggttggttgttctatcacagcaacagaaaagccaactggaacaaccagataattcttctttaccaagattattatattactctaacaagcctacagatagacaccataatatttttgttttgtagaacaggaacctaaggtccaggattaaaatgacaaacggaccagtttcacatggctaataagggtaaagtatagtgaggaaatgtttgttcccttccctttggtatagtacatcattgtaaataatttagcccccccccaagattgtcagatgcatttttaagcaatattttgcctagttgctaggctcaaatgaagtggtgtatttctataggaaggttagtgaaagctctttgtgctataagcatgtaaggtaccattgatgactaagtccttcaatctcaattagtatgaaaggcatgcatatgtttatttttcatgacaatcaatcagttctttcagttctcatttactcatcctttacacgctttgttgatactttacttcctgtcagcagttacacaaggaactgagtagtattcagtgcaatcattttgacagcacttactcaaatgcttggaaagttacaggttggaaataatgggatcacttcttgtctcatggaagacatttttctttatttcctttccaatttatagcttcattacctacttaaaatgtaatttttatgtaggctgcaggaaacatttataatcaacaacaacatttattaaacttgttttgttacattgtttgaagttaatattgtagttggagatgtaaaatgataaaacatatagggaaaatattaaacttctatttcttaataggatcgcctctatataataaattttggtaaagctttcacatccctatcaaagtctatcatgaagggagatgacggcaggaacctgtgggaaggaactgaagcagagagcatagagggattccaatttactggcttactccccatggctgctctacttgctttctagtaccatctgttcaggagatgtactacttcaagtcaactaggtcctaccacatcaatcaagaaaatgaccacagacatgcctacaggacagtctgatagaagggtcccttacatgaggttctctcttctcaggtgactacagattatatcatgttgaaaaaatttagccaatacaagcaatagcagtattgccatttttcaggataatattgccctctctaaaggtggacccacggacagtaattgctatctgtgtgcaaaccatggctgaaagagctatgtacaatcaatggttccagccagtgttcacagcatgttatgtttccaactaagaattctgtaggcttttctcaaattaaaagtcaattcgtttttacattaaaaactaaataaaaggtatgggatggatagtgcattagttggcagggcaggcgaggaggggagggagagggacctgggattgacatgtaaaataattttctttctaataataaaaaaaaagattggtccaagtaactaaacttattagtttgtcattttcactgcagacttagaacattctttttaaaatatttcttgtctagtattgatattaaaagtttattttagagtaaagggggatgttaccaaaagtacattttagttttctgtgtactgacttaggataatataagcatagtcatacggacaagtttctacattctaatgattttcaaattaaggaatggcttcaaattaggaaacctttttattcacctagctttggaatagcatgttgtactctaattactaactttgtctgcattactttttaaagatcaaatgggcacagtggtaattttcattaatctcatacagagcagctaattaaaatttcaattattatccatctattatctagttgttgcctttgttcagtatcagatccggatgttaataataagccgttcttgtattacagctctattaagtacagtgagatttagtttaatctatcacactgttttgtttcagggttatttctttaatactatgttgtgccatattgattatgctgaagatacacactttgacatttttcaaatagaaatttcagacttatattcctgttgcttcaattttttattcaacattggggaaagtggcatagaacggataaatgaatcattggaagttcaaaatatttataatttagttctgaaacctcactaattatgccgttacctattccccagaatctacctgttttaatgtgtagtcttggctgtcttagaacttactatgtaaaccaggctggccttgaactcagagatccacatgcctctgcttcccaagggctggtatgggaggtgcatcacaatactccgctgacttctttattcctataatgagaatgttaaaagatttgattttgggaggcagaggtaggcagatctctgtgagttcaaggccagcctagtctcctgagcaagtgccagtataggctccaaagctatacagagaaaccctgtctcaaaaaaccaaaaaaatattattttctgtggtacatataactgaatataaatgttaactgtcaactacaaaattaataagatgatctaacaatgtttatattttgaattgagggaaacagttagcataaatcctaatacttggaatataagtttaaataaccctgtcaataatactttttgctactcacatcaggtttcttttcagtctgtgaacaccagctagtataattctcttttaaagggctgaggagaatgtatcctacacaatagtcttcccactcaggtctttgaagaattgttggtctgggaatttaacatggaggtagagtattgaaacaaaagagtgaggtggcatagcactcacacaaagtaaaatattgatataatctttattcttgtaattaaaattcctttaattttttaaattggtattcaaagcattagattttaatgttgcttaggagaaaagattattgaaacatactttgtttgaaaaatgtcataatgttattaatatagtctatgttttacttgcaagatttaaaaaaaaaacccttgacacctctttaaaatgacatgttctatttgtttgatagggtggcctgaaaaacagcaagcatgaatgcaccctgtcttcacaagaatatgttcatgaattgaaatcaggtatctcagatgagaaacttctcaactgtctggaatctctgagggtttccttaaccagcaatcctgtcaggtaggcagttcttatcatttttataggattcatacattttgtattgtatatagatatttcgtataatcagatatgttactttaacctcatgatttttctgttcagaagtgtattatcatctaatagaagagcattgtctgattatcaagttctaaatgtttaaaaacatctgtttagctattttgatctttactcatgtatgattttaaaatataggtaattgtttaatagttatttcctttttgagaaggagttaaatctagaagctaaatatttacatttgcatattagtctatttgtttaccaagaaaattgttatatatttgcgaaacacattaattacattggtttaaaattttattccttttacacttgtgattatacgtatgtatataatttcatattatatttaaattttacatagaccacgttacacacaaacatacacacacatttttgtaactttgagatagctcaaactacttttaaacaaataaagaaatggagactattaattaattccttactattttatacattcattaaactatcttacagatgtttataaagaggcaagtttttgatagcaatgggtttgaataataattctttattgacaataacaggctttaaaattagtaatatcccaaataatgtcttatgaaaaaaatagatttcaatgtaatattgaatcattctgtgatctacatgctaaattatcaccgttttgagttcagaatttactaaaatgagtatataaagacaatgtaattttattagtgtttcccttatatttttcagactgatatctagttcataaagcactgaaaataatttaaatctcagtcatttaggtggaatcaggtataaattcgatatatttgttatttagagtcatatttttgataaaatttgaaagttataatttcataataaagacagtgttaagatgtgacttgctttaggttagaagcattttttagttgttgctatcttgctatttctaaaatggcatgcttttaagatttagtgatctcacgaaaagatttgagatctctattatttttttattttgtaccatctcaaatttgtaggccaggccagcctggaactaacaacatctttcaggctgtgtttgaatgttaagtaacccttctgctgtggcctcctaactgctaagnnnnnnnnnnnnnnnnnnnnnnnnnnnnnnnnnnnnnnnnnnnnnnnnnnnnnnnnnnnnnnnnnnnnnnnnnnnnnnnnnnnnnnnnnnnnnnnnnnnnnnnnnnnnnnnnnnnnnnnnnnnnnnnnnnnnnnnnnnnnnnnnnnnnnnnnnnnnnnnnnnnnnnnnnnnnnnnnnnnnnnnnnnnnnnnnnnnnnnnnnnnnnnnnnnnnnnnnnnnnnnnnnnnnnnnnnnnnnnnnnnnnnnnnnnnnnnnnnnnnnnnnnnnnnnnnnnnnnnnnnnnnnnnnnnnnnnnnnnnnnnnnnnnnnnnnnnnnnnnnnnnnnnnnnnnnnnnnnnnnnnnnnnnnnnnnnnnnnnnnnnnnnnnnnnnnnnnnnnnnnnnnnnnnnnnnnnnnnnnnnnnnnnnnnnnnnnnnnnnnnnnnnnnnnnaacatgcaaaggagggctttgtaatctcgcgagaatgttgggtcctcatctggtagctgattggctgttcagtaaggtcttgaggcgttggcattctgcaatagctctagtccgaggttggaggtgccatcttgctgagattcgagagaccgtcgacaagcgagtttctgtgcagcctgtgagcgaacacctcttgctgtcgagccatcaaatcctgccaagacttcaaaagatgatgagtaagagtgggtttgggagtaatgatagctttgttgatgatgatggggctaacagggcaagcggcagtgatgagcaagctggaggtcaggacctgggtcttcccatgaccaccttgaccaggcctggcattcacagcattgtgccttgctgcataagccagttgcttactgctgttgaggttgacaacgtgtttaagatcaggggctttgcacttcaccgggtctctatcgtggggatgatcatggaggccaagaaagcttcgcggtacatgatgtacaagattgatgacatgaccgcaaaggccatcgaggccaggcagcccctgtcgcgcgagagggtcaggcaatgtgtgattcccctgccagttggcgtgtatgccaaagtgcttggtgtcctccagtcctcggagggaaccagacggcttggggttctaagcatccgtgtcctggaagatatgaatgagctgtccacacacaccttggaggtcgtcaatgcccacatgatgctggatcaaagtcgtgaaggtgtgtccacaggaaggcacctcttggaagaagccccagcaggagcagccgccgccagggttgctaaggcagctagtcttaatttcatccatttggaggtgctgcgtctgattcaagaatgtcctcaccaggaagggaaggctattagtgagctgcgaagagacctccatgcacttaccgatgaagctgtcactcaagctatcaggcatctgatttccacacaacgcatctctgccacctcggatagtgagtaccttaaaatttcaggctgaggcaatgaaaggattttgcggtttctgaagatgtttttgttctactgttcagacttttaggaaataccatttgtttcgaatgacaacaatgaaatacaaaaaacaaaaaacaaaacaaaaagaaataaaacaacaacaaaaaaactctccccaaattgcaaaagcagatgaaactgaccgaagttctcagcgccacctgttagcaatgtgctatttctaactccattgaacttgttggttttctgaagagatttgaagtgttagacccaataactggactcagtacagtttctttccaaaattattcccttggatggaattataatggaaaaaatgtgtccaaattagaattatattccctgtgttaattaatcttagctatgctaatttttcctaaatatattacaagaaatacagctttactggaaattgttatgatttcaaatattaggtcaattgtttgagtaatttgatttgattaacattgatttatttacttaaaacacaatatttgactacttatttaatcaattcactctttttttgagtcatcttcaaataattacttttaacatgtgatttcagtggttttgctttttctattaaattagtttacttttcttgtattgtatgtgggtgccagactatgtttttctcatggtggtgcaataccaacactgctgcgatggtctactctagggtaaaacaggttgttttgtttagagataagctttataacagttctagaaacagaagacttaatgagttgtaacagaaattaactaaattgttccattaaagctttgcaaagaaattttaagtttcctgtgtgatttttccccaaatttattagaaaatgttgtaagtttaatgtttttaagtgttataagcttctattatgaagtataaatttttgttttatttttaataccaatcattatatcttactagtactaactcatttttgagttggttatattaaatatgagaggcctttaagtcactgatcattaagccctccattatgcatacaataaaatggtgtatttcaaattacttgtttggttaaattacaggaaagaacaatatttttctagtaatagatgggtttgcctatgtgtgttcagataggtagaaaagaatattgatcctcttcattcattaaaaggtgacaaaaacctataacatagttttgctatttagcagtcagtaatctgttttcaggaaaatagtcagaaagtgatggcctttcatgatcagtccttaaaataattactgaaaaatcttgcagaagatcttgtgattcagtgtttactctcctcagaagcacataaaatataaatgctatttaaaatttttatttttttaacgttttaaaagatatttattttattcacgtgagtgttttacctggatgggtgtttgtgtatctcgtgcatgcctggtgcccttggagatcagaagagggcatcatatatcctgactggagtggcagatgtttgtgaaccactgtgtgggtgctggaaactgaacttggactctctgcaagaacagtgttcttaactgctgcaacatctctccagatcctataagtggtattttttaaataatattttgttctttgataaatctagctaattaattttagtcatacatgaaagaaccctgaaattgtcacaagacaccccaagaccaagttctcaggacaaaagagattaatttgactcagagggataaaaaaacagcaaagtagagggaatgtggagaagagtaaaaggcaaaacctgttggtgacatttaaacattctgtgccttcaagagcccttcaatattcctcccctatctctttctagatactcccgaaattaaaggaaataaaaaggaaaggacatggctgctcctaggtatggtggaggagaaagttcattgtagagatgtaggagaggataggcagaggcagggatggctgggaaagtccagagtggacaagaaccagactgggctgggctacttgggggaaggggtgtgggggcagaaaccatgtgcagcagccatgaggccaaaggtataaaggactggtaatcaaaatgtcttgattatgcagggcagagcctctgggggaaggacagtctgttccctaggctggaaagtttagggaaggggatggacatgccagccataacctggtaggaactgagggatactgggagagcctggtggccaggttggcttctatatgtaaataggtacctcagtcatttgttccagttttgaaacgtaacacccctaccttttgttgatactaaagggggccataatcatttgtgcctagttcctgttgacactggggcattgttgttgaggacccaaaaagctggaatgctggccaagtctgggaagctgtttcacttctctggactctgggggacttctggggttaggaaagtgcaagcatcatttagagcactttgccatctttggttggaaatcttctggaacagatatattaggggcagaaggtagagttaagtttagagggaatttttttccttaggtgtacaattgatatttcttggcccatggtcctcttagctgggggaggggaatcccaaggacaggggaaggggaagagatctcacccacagaaataggcaggtggggaaacagaactccattgattaatgttaaaattctgaattcctgaaacttaatattgcagtagcatagcaagggaaagaaatctaaagcatttttcactttttaagtatttaaatcaccttaaaaaaatttttttttctgagtctggtaacaaggtaaactgtgcctagacctagtagtagctctaggggagtaaggcctgaagcttgatttttacacatgaagagaactgaaaaggcagatgaagccttggttgctgctgttaaactcacaaggctgatactagcattgtcattaacactatttgagatctgagaaggaagaatttcacctaataggaagtacagaccaagcagcttctgaatctattaaaaatgacagagactagtccattacccagatggccatcccaggctcctgtgtgtaatgataaatctttttgctaacccgcccgagtcctgctgccatgtgggtagccaaaataacacacagactagtattaggtacaatgctgctggccaatgcctaagatttctcatatgctaactcagtattaattatcaaccataactactaatctttatattttataaggcttatggaggatgccgggnnnnnnnnnnnnnnnnnnnnnnnnnnnnnnnnnnnnnnnnnnnnnnnnnnnnnnnnnnnnnnnnnnnnnnnnnnnnnnnnnnnnnnnnnnnnnnnnnnnnnnnnnnnnnnnnnnnnnnnnnnnnnnnnnnnnnnnnnnnnnnnnnnnnnnnnnnnnnnnnnnnnnnnnnnnnnnnnnnnnnnnnnnnnnnnnnnnnnnnnnnnnnnnnnnnnnnnnnnnnnnnnnnnnnnnnnnnnnnnnnnnnnnnnnnnnnnnnnnnnnnnnnnnnnnnnnnnnnnnnnnnnnnnnnnnnnnnnnnnnnnnnnnnnnnnnnnnnnnnnnnnnnnnnnnnnnnnnnnnnnnnnnnnnnnnnnnnnnnnnnnnnnnnnnnnnnnnnnnnnnnnnnnnnnnnnnnnnnnnnnnnnnnnnnnnnnnnnnnnnnnnnnnnnnnnnnnnnnnnnnnnnnnnnnnnnnnnnnnnnnnnnnnnnnnnnnnnnnnnnnnnnnnnnnnnnnnnnnnnnnnnnnnnnnnnnnnnnnnnnnnnnnnnnnnnnnnnnnnnnnnnnnnnnnnnnnnnnnnnnnnnnnnnnnnnnnnnnnnnnnnnnnnnnnnnnnnnnnnnnnnnnnnnnnnnnnnnnnnnnnnnnnnnnnnnnnnnnnnnnnnnnnnnnnnnnnnnnnnnnnnnnnnnnnnnnnnnnnnnnnnnnnnnnnnnnnnnnnnnnnnnnnnnnnnnnnnnnnnnnnnnnnnnnnnnnnnnnnnnnnnnnnnnnnnnnnnnnatgtgggatgggctctcaaagtcccttcttataccagggaaaaatactaatccactaccaggggccccctagagtgcagaggccacctgattgacatccgtgttcaggggtctggatcagttctgtactgtcctcccatacagcagtctggggtccatgtgctcccctttgttcaggccagctgattctttgggtttcaccagcctggtaccgaccccttcaattttcattcctccctctctgcaactaagttccagcgtacagttcagtgaatatctttggatgtctgcctctgcttccatcagnnnnnnnnnnnnnnnnnnnnnnnnnnnnnnnnnnnnnnnnnnnnnnnnnnnnnnnnnnnnnnnnnnnnnnnnnnnnnnnnnnnnnnnnnnnnnnnnnnnnnnnnnnntgtcatccttgtaagtctctggaaatctccctagtgccagatctctccttggacctataatggctccctgtaacatggtatctctcatcctgctctcctctattcttcccccaactcaatatttctgctcctcgatttcctcctctcctctcttcttctcctcctctcattctggcagctctgtctcctctaccctcatgctctcaattagctcaggagatcctgccccttcccattctctggggtccatgcgtttttcccttagagtccttcatgtttcctagtttctttggtgaagagattgtaggctggtaatcctttgctctatgtctaaaattcatatgtgagtgagtatgttacgataaatctttccgccaaaagtcgcctgagccccactgccatgtgtgagctttacgccagctgccctcccgagttaggcccaaatgaatacacagaaacttgtattaggttcaatgctgcttggccaatgactaggattgttatctgttagttcagtcttaactatcataaacctatatattttataaaacttatcttatcggacgcctaattggcatccctccttgtcagtggatcacatcatgccactggaacaggagcggaggggaaaagagagcccttcctgtttctccttcgcttaaatatgagtctccttgccatgtcacttcctgcctgtatcagcacttctctactacatttcccagaatcctctttgactcctagtcctgcctaacttgtcatttcattggccaaacagtattttatttaacaatcaataagataaacatacnnnnnnnnnntccccatcatgagtacataccatgtttgtctttttgtgactgggttacctcactcagaatggtttcttctagttccatccatttgcctgccaatttaaagatcccattgcttttttctgctgagtagttctccattgtataaatgtatcacattttctctatccattcttcagttgaggggcttccaggttctggctattacaaaaaatgctgctatgaacatggttgaatgtatgtgcttgttgtatggacatgcattatttgggtaaatgcccaagagaagaatttctggatctcgaggtagactgattcacatttttctgagcaactgccatactgatttccaaagtggtcttcttgtacttccattggcatgtctttctttaggttggtaaagttttcttctataattttgttgaatatgttttctgtacctttgagctgtatttcttcaccttcttctatacctattattcttaggtttggtcttttcacagtgtcgcgtatttcctggatattttgtgttagggatttgttggacttgaggttttctttgattgatgaatgtatatcctctagcgagtcttcacctttctatttccaggatccccttgttctgtgttttctttattgtgtctatttcagctttcatgccttgaactcttttgactgcttccttcatttgtttggttgttttttcttggctttctttagattctttaagagatttatttacttcttgaattttttggtttggcttttccttcatttcatgtaatttttgcttgtttttttttttctatttctttaagggattttctcgtttactctttatagatctctatcatcttcctaagataatttttgatgtccatctcttcctcatcctctgtggtgggtttttcagatctagctggtgtggagtccctagattctggtggtgtcatattggtttttctgtttttgagtgtgtttttactctgtcttttttctatcccttcttccagtgagtgcaggtggggtctctctctctcaggtggttggcagaaggctcagcctctggcagtcagcgggatggctgagggtggtgggtggtgtggacaacggtggggtgtgtcaggactcagcctgggccttcccggtcaggtcaggtccactcttctatgagtggactcaggcagaaggaagcagggattgatgggggaggttggggagcagagcagcgcccagactcacctgagatttgggcacctgcagcaggacagagggcaaagtgtagacaggggtgaggtgtgtccagactctgggtgggccttgctgtttgggaaggtcctctcttgtctggggtagggttcaggcagaagtgagcaggagtttatgggggaggttgctgggggcagaacagtgcccagactcacctgaggctccagtgcctgcctcannnnnnnnnnnnnnnnnnnnnnnnnnnnnnnnnnnnnnnnnnnnnnnnnnnnnnnnnnnnnnnnnnnnnnnnnnnnnnnnnnnnnnnnnnnnnnnnnnnnnnnnnnnnnnnnnnnnnnnnnnnnnnnnnnnnnnnnnnnnnnnnncgggtgcctgctgcaggacagagcagagtgtcttagggtttctattgctgtgaagagatatcatgaccacgaaaacccttataaaggaaaacatttagttggggtgaattactgttcagaggtttagtccattatcatcatggcaggacatggtggcatgcaggcagacatagtgctggataaggggatgaaatccctacatcttgatacataggcaactgggagtgatctgaattaggagtagcttataaataggagatctcaatgccctctcccaacacccatactccaagaaggtcacagctactcaaataaaaccatacctcctaagaagctcactccctgtgaggttatgggagccaattacatccaaactaccacatctaagaatagcaagaatgttgagaagacaggtccttagccattctaaggtagtaacagaacccagttaggtttcacaagcctctcttaactcagttacaacaaatttatgacaatcatcctaaacttcaaatattgacattgactcttcaattatcaaattatttgtgttaactacatgatctttgtattgcccagttcagatttctaatagagcatctctggtagatggaaacaaatatattccaggtgatgtctgagaaatgtagctggaacctttatgttttaactctcccatattggagaactcagtataaagatttttatggccatagtgagttataagtgagatagtagttgaaaaattcacaccttggaattctttgtcttcagatagatactatgtccatttcttgatcttcatcagttctgtatctgacatcctagggcagcatctgcatttctcttaagtaaataaactcccatgaagaaatggaaaggatgacacttaacatagaatgccatttgaaatgaatgaattattaaaagattaaggaaaggacggtgtcaaaagtaaatccaagtctatatcaaagattggaagggaggcagaaacaaaagtctcctatttatcaccacatatttcaattttccttcctaaaattgtgaataattttgtcacggatgtattttatgtttcatatcacagtcgaaatatagttcctgatggcactcttacgttagtggtatttgtgtttttatcacaagactaaataagttctgaaggtacaggataatgtcttcctccatttagaacccacagtaaatagtatcattgatttttaaataaagtgtgtagaagtgctgtaggaaatagttatttaatgttactaacactttgtacattaaagaagattcattttattcctttgaagtgtcagcatccaccccatagtatacaatggaatatacttcctatttccaccaggtaaaacccactgtaaaccatggaactttgctctctagatattttcagctttaaaagccctctcagaaagtaacaaataagcaaacaaaccaacacagcaaacaacagattaatcttcctactggatagaaacaaatatgtaaataaaatcaatgaagcaacagcaaaaaggaagccagcattagaagaaaccaagaatcataataaagtatatgaattaagttacacagataaaacaaacactacaagcaaagacaaatcactttgagtacagtgtattgtgcaacagttaaatagtccttgaaattagggatcactgagaatcatcctgttaatctcatatgatttgtgcaacaatcaccacaaagacagtagtttaaaacattaaaaatttagactcttaaagttaaagaagacagaagtttcactgagcttcctcccagagcttagaggaagcatttttgcctattctggctccttggtttccctggctcttggcaggttgagtccagcctttgctttttctttccatggattatttattcttggaccacttgtctgtcttttataaggacatgacttatggcccactctgatccactagaaatgtcattgtgatctttattttatatctagaaacatcctattttcaagtaaagtcatattctgaagttctgagtggataatgttcaatccaccattattttgcaaagggacattagctttaaatcaattaaaatgacaaaacaaggctcagttattttcaagaaatggcattaactagctcagaaaagttagaaaatataaaatttgtcactttagcctccttagtgaaattgtattttgctagattttttcttcttataaaaaagtattttttgtggttaccaattatgagggctatatcttatatgatggagttactctggagtatgcctgagatttggtttctgttccttatgctctcactttcctttctaagttggtgtacttgctttgcacctcagatactccttattgaaagcttccagtataaacctatgagttttatgttctcctttgcttatttccattcttattatcttggcgcatagaattagcttcctggctagaaattattttcacaaaggtgggtgactgtttctctacaaatttagagaatttttaaaagttaaatatttattatgtttgattaacacagatgaattttaaagatttgttttttatgtatatgaatgtttgattacatgtatatatgtgtgcagtgtgtgtctgttgaaagtagaggccaaaggatacatcagatctccttgaactagaattacatatgattgggagctgttgtgtaggcgctgggaactaaacttgggtcctcttcaaaaagagcaagtgttaactgctgaaccatctctccagctccagacatttttgtttttttgagacaaggtttcattgttttgccctgcctggcctggagcttactatgtacatgaggtgggcctcaaactcacagaggaaagcatgtgccaccatgcctgacacccattccccagaatttttcttgaaatgttgaagtacattttaatactattgttgcataattgtgtattgtacatgaaatccaaaagaaaccnnnnnnnnnnntgactccccattcttaccatgattataaatgctttctttgtgttcaggaactagttttaaaaaatcaccattaagttttattatatattcttttttcccattaagcaaagattatatattttttgttttgttttgtaagttttattagttcaaattaggaacaagcttgcttcacatgtcaatcccttgacaggggctccctaaattccaccacatcatcctgagccgggcctaggccttccccatgtatccaggctaagatgtggaaagggctctcaaagtcccttcttacaacagggaaaattactaatccactaccaggggccccctagagtgcggaggctcaggggtctggatcagtcgtgtgatggcctcccagacagcagtctggggtcaatgtgctcccccttgtacaggccagcggtttctgtgggtttcaccagcctgctactgacccctttgatcttcattcctccctttctgcaactaagttccagagttcagttcagtgtatatctgtgggtgtctgcctctgctttcatcagccactggatgagggctctaggatggcataaaaagtagtcatcagcctctttataggggaagggcatttaggttgtcctctccaccactgccagattgtcagtttttgtcatccttgtaggtctctggaatctcccttgtgccagatctctccttggacctataatggctccctgtaacatggtatctctcatcctgcattcctctattcttcccccaactcaatatttctgctcctccatttcctcctctcctctcctgttctcctgctctcattctgtcagctgcccctcccctaccctcatgctcccaattacctcaggagttcctgcgccttcccattcccggggtccatgcatttatcacctagagtatttcatgtttcctaatttctttgaagaggattgtaggctggtaatcctttgctctatgtgtaaaattcatatatgagtgagtacatactatgtgtttttgtgactgggttacctcactaaggatggtttcttctagttctagtctgtcagaatggctgaaataaaaaaaaacaaaaacactaatgacagtttatgctggctctgctgagtagtactccattgtataaatgtatcacattttctctatccattcttcagttgagaggcatttaggttgcttccactttctggctattacaaacaatgctgctatgaacatgttgaacttatatgtccttgttgcatggacatgcaatatttgggtatatgcccaagagaggaattgctggatcttgaggtagactgattcccattttttttttgcgcaaccgcaatcacagatatttaaaatattaaatggaataatcaattcacatttttttattatttaattcactgatgataaaataaagttaattgagttctattattttctgctaaaagcaaatgctgaaaaatttctcttatcaactataattagctcatgatgtctcaaatctcttactgtgcattccgtcattatgtatattctgttatgcatatttattagtagctgcctatgttttataattgtttcatgctcacatgtcttcttttctcatttaatttttcctctgttctggggaagtggcacacttgcagtcttgtttgtttcatgatgtctgatactgtgtaatttatgtacaaaaaagtgtgatttgatgtggatattgacccattaggaacaacctgtgcttcttaagcaggaagaaagaattctcattaatcttgtactattttgtgaccatgcatttttagctgtgatcagaataagataatgaatataacttctcccacataggattggaatgtgttggtttgattgaaccatattcataagctgcagacagcattgcatgctttacccattattctttttttatttcacagtgacttaaagaaatacaatgtttattattctaatactctaaaaatccatgtacttcagcagtaaaaggaatcttagtcccttcatcacaacttgcactagactttgcacataccatggtctctgtgatttagaaagagcagtatgtgacttacaaatttgtatttttattcccttcctgaatttataaaaggaagcactgtctaatgggaaatgacttgtgagtttggaacattttagcccagtgaagcagttataggatatatagatatttggcaatatatttcatgaggaaccaaagtgtgatgcaataaaacattgccagaaaattttctcaacactcaactaaaagagaaaatactattttgaagattagtaaagctgtaagtgttggaggatggggacttttgtaaaatattgggcatgacttggctgttgtgcacatgaactcacagtacctgtggttacctgcctaagaactgcagaagatgaagccactcaaaatttttgcagcatgggcaagtggctcaaagggcctaaccacttgctgaggatttagctgttcagaatttatggtttccaggggatggagtgtcacttttatttgacctcctgaggggtgtgacctttgcttttttttttttttttgagacatggtttctctgtggctttagaggctgtcctggaactagctgttgtagaccaggctggtctcgaactcacagagatctgcctgcctctgcctctcgagtgctgggattaaaggcgtgagccatcaatgcccggtggtgtgtgacctttgcttggttaacaattcttcagtggatggcctcacagtcacacacacatgggcagcattaactgggaacaatggaatttattgtttgaaaaagaaggcatggagtttggagtagaagggctctgtggaaaatcaaaggagggaaatgaggggtggatgtgatcaagagatgttgtatacatgtctgaaattccaaaagaataattaaatattttaaaaaatagcatcctagaattgtgattgaataggatgattttcatcattcttctggaaatatccttgtagcttgagggatatgttatcatgcttggaaacttttcttctgttttgctgagtatctgaatttctgccaaacccaaggcaaaatgattgtgctcacttcctgtgactgtggcttcctcagtaaatgttttcacacatgtgaaaatggaaaataaaattgtctcaagtttataaatgtgcagttgtttgtgttatctctgatgtattttttcttgatagttctttcatttatgtttaaacacattttctagcatattaacaaatatgcgtttaacatagtcagtgtaatgaatgtagctggatcttgacagcagtacaaattagcaatagaagtattttctcaattatgagtgttaataactatttaaacagcctgtattaaacttattaaaagcttggcaatgcagccaacactacttagagaattaatataaaggtaagtacagatcaatactcctagaatgctttattgagagctacctatgaaaaatggaataatgaaggcaatgatttatggtgtagaaatgggaacaggacttaaaaatgtaagcacagctcagaaggcagcattttgagtactattactaaagcaggtttttaatatttatgtttgcagtttgtttgctgtaagtttctagtacatgaattatttcagaatattagtagtacttttatgcagagaatagaaaatgctgcagtcattgctgttatatcaactttcatgcattctgttaaatttttggtcagtattatcaattagtctcaagcacatacaaattaatttgaccaaactaacttaaatgttaagaaaccttaaaattttaatcatgaaatatttgtttaaaatgcaattttcttgccttagttacattcagcattatacctcataatagaaggaaacaaggtctttgtgtgctatattaattttaaaaggaattaggcagccaggctgtggtggtacacgcctttaatccagcactcacggggcagaggcaggtggatttctgagtttgaggccagactgttctacaaggctagttccaagacaacatgttcttttacacaaagtaatcctgtctcaaaacaaacaaacaaacaaacaaataaaccaaaaaatcattaggcacacccaaagctgagcaagtctttgaattgttttaatgggtaactttcagtatagttatgataaataggggctctttgtttgaatttgttttatttttacatgatgtggatattccaccaaggtcacatctttttttttttaagtgatatgtgagaatataaagaataagcatctaaaatagaggagaacgtagttcatttccaaagtctggtccattgtgacataatgatctgagtgtatattatttgtactgaagagtcatgggtagcaatatattgcaagacagaattttcacctgtaaattatggtgcattcatgatttaaagggggggaatcttcctaattttgaacttgagaattttatttcatgtttttcaaatcagagatactgtacaaaccaattcaataaattttcatgaaacacagagaatctctatgaatgaatgactgttcttttcccacatggagcctttctactcacacctatagtaatagtactagttgcagatttcctgcattctaacctgttactaaggtttattatatttcaggaatgcccctgaggttctcccctgggcatatctatcatctcagctaaacttttgataggagttggatagctgacaattcacaattaagatgccagctaacacacctaggagagctaagtattccgtgtggattgttgagaggagatccatgtgcactagacaacagtagttgctcttcgaccccagctgtttgactgatgttagataatggacatttaaattggggaaatttcccacctatcagtaaggctatttcacttgaggcaacttcaacctgaaaaccttgtgttgagatggaatccatacaggcagaatgtagaaacgagcatgatattacagtgttcttttacaagtaaatgagcttcaggtgagattgtttagcagcctatgacatgaatatggttttaaagccttctttcatcccaaataaacccacagctagatgtttgatctcttctgtaaaatccagtgctgctgataatattcaggttgtctccaattccccctattttcaggaatatatcccttggttttgagtcgaaatctatgtaggtggtggtggtggtggtgatggtggtggtggtggtgtgtgggtgtgtgtgtgtgtggcatgtgttttaatattgtactgtaccttctttgatgtcaggttcctaatgagtttctttgagatgcattcttaaatttgctttttcaatattcatttatcaaaaggtactgaagactgaagtgctgtaaacagatttacaagaaattatgttatcataaatttccccatggggattaatatttatttgtcaaggaataaaggacaccctgaaatagatccaaatctatatctgtattaagcattaatgaatatttctttcatatagaaaatgtttaagaagtttgtattgtgttagagcccagcatatgaaccttgattgaaatagcataatgctattattgtgagaggccatcaatcttgggatactctttgatcttaagtcacactgtaagttgtaaagtattccttccatttacttattcatcattacattcttctgggaatggaatagaggatgtgttatgtttagtcattaggaggcttttatttagttatctgaaattattttcttaaaatctaattgatggatactatttgtatatatttataggacaggttttgacattttaatagatgtatgtaatgtgtaatgatcagatcagggtaattgaaatataaatcattccaaacacttatcaattttttgtgctatggacattaaaaattatctccattagctattatgaaatacacaattaatcgacactaattattctcttactttgctgttcaacattggaaaacattcatcatattatatgctatttgaacttattatttttgaattatttacaagtaataataattcacatgctgattctagcattcactttcatgacttctttctccttttaaatgagcctgggaattaaaaatatactattttagaagagttgagttgaggagaaagaattccaaatagattaacatttcaaatatgtgactagacgtttctgagctatcaatatgaatgatgctagataaatacgaataaccaaacacttctttagagatggaagaaacatgtttctggcatgctgtgaggacatatatataagcatgttgctgggatttttctgtttgtgagctcgcaagtcttgaaatcaaacgaaattattcaacttacttttaaaataactattcggttgttatttttttaatttatttattagttctagttagggaaccagcttgtttcacatgaaagtccctttttcctctcccttccctcacctccatccctcctcccccacccccagcctacccccaaccccacccacccaccactcctcaggcagggtagggccctcaacgggggctcagcaaagtccaccaagtcttcctatgctggtcctgggcccttctccatgtgnnnnnnnnnnnnnnnnnnnnnnnnnnnnnnnnnnnnnnnnnnnnnnnnnnnnnnnnnnnnnnnnnnnnnnnnnnnnnnnnnnnnnnnnnnnnnnnnnnnnnnnnnnnnnnnnnnnnnnnnnnnnnnnnnnnnnnnnnnnnnnnnnnnnnnnnnnnnnnnnnnnnnnnnnnnnnnnnnnnnnnnnnnnnnnnnnnnnnnnnnnnnnnnnnnnnnnnnnnnnnnnnnnnnnnnnnnnnnnnnnnnnnnnnnnnnnnnnnnnnnnnnnnnnnnnnnnnnnnnnnnnnnnnnnnnnnnnnnnnnnnnnnnnnnnnnnnnnnnnnnnnnnnnnnnnnnnnnnnnnnnnnnnnnnnnnnnnnnnnnnnnnnnnnnnnnnnnnnnnnnnnnnnnnnnnnnnnnnnnnnnnnnnnnnnnnnnnnnnnnnnnnnnnnnnnnnnnnnnnnnnntatagtggctccctctgatattgtatctctcatcctgctctctctcctctattcttcccccaactcaatatttcttcccctccatttcctctcctctactcttcttctcttgctcttattgtagcagctccctcccccctaccctcatgctcccaattagttcaggagttcatgccacttccattcctgggaaccatttatcccttgtttttttttaacaattgaataaatgaatatactttattgttgggagttctcttatcccatcatggttttgtatctctgccgtgtgcatatgatctggagtcacctttgacagtgtatttcatcttatttgctcttacttttgttgttttgatcactcccagagcttttctatttcattactgaacttttgttcacaccttagtccttttggaaaaggacatcattgaaagaggatgggggttggttttgcaaaacaaaaaaggaagtcattcaatttattgaaaattgggaaatttgaaatttgaaattcaaagagatgatgaagtaaggaagttagtggacagggatggcacatgacagtctgcaacattctggctgagtagagaattctgtaatgtcaaacaagcactgctattcccaaaccaaaaacaactattacattttcgctagagacttctcaatacttttctagcagactgactatcaactcatatttactacatgttttgacgttaattttaaatgtttgtatgtaattacgtctctgtgttttgatagtccatcttctgtagtattttcttctctaaagaaatatggtattaattaggaagtagaaaggaaaatagattttcagggatgttctattgttttatgaggatggtagatggaaggaacaggttctataatgagtatcctgctgaatttttcacaacctgtgtctagaatactgtgcaacaaaaagtgtatttgggggtatcagtactatttttattgcctaaagtttccctttctttcatgatggaaaacaaaatgaataatcaaaatgaaaataccttactgttttttgtttttgcaagcaaatacatccattggtgaatttaaggtataatttacatcatgaaatgaaagagaaacccagcaaagaatgctatcaacaaaattgtttggggttactactggggacggaacattatacaccgacctgtattgccagacttcattttgtaacccaggctggccttgagtttgtgatccttcagcttcagtcctcagagtgacatggaactttgatgtgttgcagtagatctggcttaactgataatttttatattacttgttgagttgttaataatgaacttgtataggaggaaggtagcaattgcaaattgctgagtataattctgagtataatttttttttctatttagcattgtggccaaagaaaatgtagtcaactttatatttttcatctgggaaatggagtaacttacttgattttatgatcagtaaagctatacatttcagtgttttattttgtaacagtttatttgcaaatgaagacaaatttattcccagtcagcctgcttccctccctttcctcctccctccctcttttgcatcttttcttccaaaaagattatactttatttggtgtttaactgtccaaaatgaggagaaaagtagctattacactttctatagtgaatgaacctataattccactactcagagagtctaagcaggactattgtgacttggagacttgccctgattacatttatgacttttaggccagcctgacaccttgttttataaaaccaaggataggcatgtagctcagtggtagactacttatcaaccatgtgcaagtctctcggtttgatctccctggtacacacaagcaaatgtcattagcattttgagaaggctaatgaaattgtagtattcataacattatagtcctttaaaagatgtttatatcttgagagacttattacataaaatgtgtatcttttataaattactatacttttcaattattctgaaaataaaaaaaaataggccaggttgtatatactaaaggatgatatctctttcatattttatcatgtaataattatatacatcatatgttagctattatttttgttaacacatattcattctacatagatggcttatttcattgtaatagaaaaataaagattacctttcacttaataattgacaatacacattaaggttcctgttttgattaatgtgttttcgttaatgattttgaaaagtttcatttacatcaaatgtattaggaaatttatatttgtcaaaggttacaaaatttctcacgttatctagtgtatatagtggtgactatatacagtaaataatagtataatatactattgaaaattgctaagaaaatatattttgtactgttttcaccataggagaaaaatgatgaggatatgagaaatgtatatgttgttattccacagctttatgaataagtcatgtgtatattataaatatatatggtttccactactgaaaatacaatgaataaaaatacatttacccatataggtacaagcaaaaattacatattcgccacagtttatttctcagttttatatagatatatttaatataaaatataaagattaatacagaaaagacaaaagtttctatctttaaatttcatgctcttagtaaacaacatccaaagaaattgttcctttccgacatatgtgtaatatcctgtgctaaaaatatccgtgaacattaaatttgtttgatctttgtctacatagcaatcaccatgtataatgagacgttaattacatgtttttcacattgtacctggtaggtgagaagaaaggttgcatttctgtttcgtactcatcaaagagcaattgtccttcagctttccttgcccttcttttcttatactgcaggagaattcatttaccacttgtttacttcccagcagaatcagaaagcataatatacaaactgggttagaaaaaaggggatgtgagccagtgttttgtgctaatgccattgtttttcctgattgcagtcaaggacttactttatttatgacagataaactctgtcaaccctttttcattttcaggatttgcagattaggaatgtgctttcttggaataaattcattttaacaaaattcaatggaaccaacagaaattggatgtcctgtggagtacatgatagaattttagctatattacttagctttggaaaataaaccaatacatttttttcttgtggaagctaacattttattgtaaatttgaatggttagatcagtaagccatcagatttagtaagttttctaacataattatagtcacaattgcaaacatatcaagatgtaaaatatgactggttttggcttgaatatgggaaatgttctttactcttgctttttctctatttactatagattgagaagtctattttcattttcattcacacttgaaataatttacgccattattgctacaggatacaactttgtattatacttttataacttttaaaggcagatgcaggggaaaataatcttcactgcctagcctgttgatatttaaaatagatacagttaaagctatttcctagactatctccaaagtaattcaggcagactaagaaattgattttaataatagggaactgttctctgagagaaaatttgcagttagttttgttctttaagaagactattgcatgcgacttgaggtattgcagtattttgttataacagtatgaaagagaaatttgtttttatataatgtaatcaacctgaaaaggtgaacattttctcctcttaaaagggtgtgaatcacataggacatagcaggatcttgtcagtgagactgatggagagaataaatgcagccagagagaacgattggatgtcttctttgggaatttctaaggaaattgtaatctatcacagcattcaagaaaagcctctgagaggcaaagctggaaaattaacacattcaacctttttgtgaatcaggagaaataagcggtcagcaagtgtcatgcttcaaagcttatgcacaaatgcctggaaatggcagcattgcatcaaataggtatattataattggtcagaaatagttcatgcatttatctatgaaagtgaatcatttcaaggaattcaaatgcctagttctaatgtatttactttcatgtagacaaaatgaatggatacaattgtctttattttaattaaacccaggtaaagcatatgcacgttgctattgtattcttttttattttaacatctgctttttgatggatgtatatattgaaagagtgacaattataaaattgatttccttcaagaaaacatcctttaaaggtggttaaacaatgacatttaccttcattactttttggagttactgatccatgaagtaaatatacaatattgttttgttaggttatacagtggtcttacttattcatgtggatctcattctctttatccaagtacatataacctaaattttgttataattgcattaatgaacattacatcagggacattgtattaaaatatgatggttttgtctcaaaattagaaagacaacatttacaatattgttctaagtatcttaaactacttgaattaattgtttcatgtgttatatttttttacccattttctgattccccaagaaacttagaagtatcaatcattttatttgttgttccagtgatttgggctgtagtatcggattccacatgggattagagcaccattagagagaaatcaaatcttttgcacaaaacacaatactgtctctactagcctttagcactgcacaaacagtgataaagggatgacatgactaatattgctctccttcacatgagaccaattgcttttacaacttaagggacttagtgtagaactttctaattttagctttaactcctttgaaaggttgctataaatctagagaatcttatcaaattgaacgtataatcactgtgtccttttatatttatgcatgtgtataatagactcctttctccaccaaatattaaggttatatttgccagaaatgcaatgagctaatactgagcataaatatctaattcttgataaaatattgaagttttgtgaaagattgttctttatgtagatctggaagagaacaaaatttaaattcttttaatagaataactacgtttagagaaaaatggattcttttatacttccattcaatgtaaagtttttttttcctttgatcattgatcatgttgatcagtataagtgagccattcccacttttaaactcttaatacattttatttaaaaaataatattttattaatttttaagaatttgtgcattgtttatattcaccccgactacttccagatctactttcctttccatacacacccaactatattccttcattttttttatttaaatcattgagtctagtttatgctgcgtatatactcttgggtatatggccattcattagagtacagttcacataccaggaactatacccttaatacaaacacacacaaataactgtccttttctagtcgtatatcaattatcaataggccctggcttaggaatggaacttcaggctcccatccaccactccatgctgggaatttgatgatgtttagcttgaacagttcctgtgtgtactgtgatagctgctgtgagttcatatatgtatttgctttactgtgtatagaaacaccctttgattgtaatcataaactgcgtctggctcttacagtctttccagctcttcttttgaaattatgatctctgagccttgagaagaaagagtgtgacagtatgatatagatgagcacaccactatctcttattctctgccctttgatgagttgtacttctacatgttaatcacctactgcgaaaagaaactaatatgatgaaatttgagatgtgtatttatctatgtgtataacagtgtcacttggagttggtttaatactaagtccattaagcagagtaatagaagttctcctctagggcctatgaacttgtctagccacaggttcttgatactgataatggtgccaattatgggatccatattgtggagtgggcctcagatccaatcagatagtgacatttatggtacttttgtactagtagacattccttgccaggcctgtatatctagctcatagccaaacaagattcttgattgattttctccttccgtagtgtgtatagcaccttctaggattatgatagctagccagtagtgatgaaacttctggatcaataccagttttgatttctcgatgttctatgagtcatgaatgctttgtcttcagcagtacacatttgccatcaagttctgaaggatagacaagagcaatggcaataacataaattcaagtttgtgcatgaattataactcccaccccagtcacgcagacacacaccagtataatttccatggctttacggtgtgaatcggtagcagtaggtattgtcagaaggaaatgtatacaaagttttgaacaatatcatagctagtaatgtaatgtgagctccaaatatttaattttgacatctttgttttgaaataatcaacaggtgatgtatagtatgggctagttttctacatattttgcagaattacttttcattaaatgatgaaaagttatattaatatttttgaaatcttttatgcctaataatatactttggcctaaaactaatactatactttgtacattcagggatttgctttgtaatacgatagaaaataaatattaacttgatcttgctatcttatttatattttccattccattcaggaactgttctcaatcctgcattaaatgaacatgaaaaaccaatttcaacctgtgttggtagtgctggtggctaatcccaatacttaacagtcgaaagcaggatgaatgaagatttccagaatacaaaaatatacacatacatgaaactcatgcatgcatatacgtatacagaagggatataatacatagaattagaatctgtatatattctcctataaaaaataggcatttatactgtgtgggctcagttatcactgtgtgggctcacagagtatagcccattgatggatggtggaatgttttcttaattgtccaataaactttggaaatggtctttaaattttaacttcttcagtagcataccagattttccactgtttaatacctactgccactttttatacatatggttagagtaatgtctcagtgctaccagcacctgggaggcagtaacaggagaatcgtacttagtttaaggcaagcttgttctatacagtgaattccaggacagtaaagttaacatagagagaccctgtctcaaacaacaaaacaaccccacaaacaataacatagacaaataaacaaaaacaaagaaaataatgtatttcctggcttctttttcatctctaattctaccttcttgattacttgcagattaaacatcctgcatgggcttctcttgtctttatttagttctattgtgtcctttgggaagtttcacaagcagcggcttggatgtgtgtcttgtagcttgccaagagacctcctaatttgaatgtctcctatttgcaaacataataataataataataataataataataataacataataataatatactccaatttctttaacatacatgttctttttctttactcttttttgtctcccattcttgctgataaaataccttgcctgaattttttgtaaaaatttcagttagactctggatctgtttctttagactctggatctgtttctttgatttcttacgacagttaggatattaaaaatcaataacatgaactgtaaaatatcctacagaaacttatgaactagactgtgagtaatgaatgcatttatattatgttcatagatacaaactcaatgtagttgcagcaatcctgaattcttccatgagatcttggtactggtcctattgtgtggtatgtggcacgttatggtacactcatgtaaattgtgtctcaggaaaaagggaagaaaaaatctgtttctagatggctattgaatttaaatacagaatattaatcatcattcttttttccagcgttattgtctatatctctcacaatttatcatccatagtaaatcagaaattcatatattctggttgagacaacatgggaacatttatgtctaaaagtgtaataatacctgagtcagattttaatgtaatcatcaactgtattcttgtgattctgcatgccccaattggtattctttaagagctgcaatttatgcattttgtaaaacttgtcagccttatgtgattcatctggatttctgtactggttctgtgtgctctggtagtgagagtgtttgtggttgggagtgatgtatatagcagtctagagttctgagcctgtgtcttgtttccaaaaagggttcctctacttcttaacaaacctttcctatgccactggttgtgaaattgaccaagcagtaagatcacttttaattacattaaaaaaatacgttgctgctatctcaccacccctagggactgatcccataactcttgagctggggctccataatttgaagtgttagcacattcaccgtgatgttgattctgctggtttggggtacataatttcagcaactcttacttttgttgttatagtaaaaacaaaacaaaacaaaacaaaacaaaaaaacaacagcaagaaaccctgcccagccatgtgtacaagccaacattttgttttaattaagttaaactgtttctttctgtcttttttgtctttatgtgtttttgttggatatgtgtgcctacctaccacaatgaatgcacagagagattttagctagaggctacacagtgcttaatgcctgcaagacagaaatggtgttggtaaaaatgggggcaggagaatacttacttagttcctatgtatcattagggtacatcatagttagttcatccccctatcagcaaactactcttgggggccatttctactgcaagaactctgagcattctgcttaggcttcttcttcccattggccagatgattcttcagttgagactttgtactccatcaattgtaagaaataaacttgtcctctcttacgtttcataattgtatcttttattggaataaaaataattttcactgagtgaatccaaaatgcttttaacagtgcattttgaagtctgggatgtgtgggtggctgatttcaaatgaacaaatataaatcattctcttctatcaaataatttcctagaggaagaaagaaacaatcctaataattttaatagtactgggtataaagaaaatatgagtaatatttagcattttgaaaactatttttgaagtgttaaatttgaataaatttttgatttccttttctcaaatgtcatgggagatactggaagctgtatatgtagatttgtttagactatgttaaagttattgttctatgatgatttttgaagatttctctctgatagatgaaatacagcgtgttatacttaggactgatgtctctatctctctgccactactccactgattattcagagtctttagagaaaatagctcattgcaatggatgattacatgcctcaattgaatggtagctcattgccagttatcattacaatgccacgttgatttcttctttccattatgaaaattaaagccacattagtttaaaatgagcttccatatatattgcggatgactggttctgaatctcagctattttaaattataccttcttcagtaatctgattgctctccctggtaatctggtagaaatatagattcttaaccatgctgatatatgcctcttagatgagagatagacaggcagtatcataagttactttttgattactgtgataatataccatgatgaaggcaacttatggaagaacaaggttacttggggggcttacattttcagagggttagaatccatacccaccatgccagggataaaggtgacagtctgacagtcatggtgctggagcagtagctgggagcttacaacttggtctagaacattaatcagagagaggtaactgggaatgccatgatcttttgagaccccaaagcctatcccactgtgacagccctcatccaacacgccacatctcctcattcttctcaaacagttctgccaattaaggaccaaagtattcaaatatatgagcctatgagggtattctcattaacctccagagaaaatttagactatgaaatgtaaatatacacatagtttcaatatatggagtatctcggtagtacatatactgcaatggtacagtgtttgtctagcatgtatgaagcctggtatgttctctccagtgttgtaaaatttgtgtatatatgtagttagtagcaattttaatggctatttcataagcatctgtgtatatattttgttttgtgaaatccttgggcaatatcagattgcctatctgtggttacttaagatactaaactaaaattaatatttattgattacaaatatgtcatatagcgtatgtaagctactctaatgggggcaatgatgatagagaaatgactaagtaaagacactctctttagggaatttataatttaaatgaatctgtaatgtatgtgacaaaaaccatgtcatacatcaatagaaaacattatatgtaggtgttttaaagaagaacccatatttggttgacgatttccaagggctggagagatagttaatgatttaaaatgtttgtttgatgcttggaggctttgacatataatattgtggtttccttccttgaagataggataaataagctaacaaagaggttcagagagaactccagtaatgatcatttgtctgattatttggccaatgtggtataaattctcagtctggaaaggtagatcgagacttgatgaaactgttaggctgagtagatattgaggtaatccaagtgcattttaggactgaggaatatgactaaatgttatcagtcagatattttaaatgtaaaatgaacaaaagcaaaaaacaaaacaaaacaaaacaaaacatcttaaaaaaacgaagctacacagaaccccattggtttcttcagccataagataaagttaaccaggagtaaattaggttttaatgtaaacaatgaaaaggacataggggcatttagaggaagccttatagaagaagaagaagaagaagaagaagaagaagaagaagaagaaggtattcatgattggataagcaatgagctagtattctaacacaactgggatttaatcttgtgctattttcccagtcccactaatccatttcttcctacggatgttgtggaatattcaaaacatagtatttaaaatctctagaatctgataatctttgtactcatataatcctatttatcttcagttttccttttaggtagaatctttcaaagatctttcccaggctacatattaaataaaagcatcctggcattttacttgtttagctaagtttattttacttcattgcaataaagcactgatgtttatataattggttaattatttattatctctttatttgtaggtagtagactctaggaggataagggcttagttatgttgctcattatatctgtattacatacatacttggtaccttgtaaatgctcaacggctgtttatgaaatgagcagaataaatgaaaaggtgaaggacaatggcaggtcaaacaatttagccagtatttcaggtttgagggaatcaaagggcaatggtgttactgagagaatactgtagagtggaggaagagttgatttgagggagtagaaataatggaagatgaatttacctcataaattgtggcttaaatatgtgaagctgtactatctaaaattgtgcaatataggggtaaggaaactatgaagagaggtctgagtttcagatgatgatatcagggttattctcagcatcaagccttttatcagatgataaagataataataataaggcaggattatcatatttgaaaagaaattttcattttaatatcttactgttaaacctgtgaagttacttatatattcttttccactcatagctgggttaacaactttggccatgaaggacttggactcttactggatgctctggaaaagcttctagacaaaaaacagtaagaatgaagttttaaaaaactttcacaaaaaaacttttcacacatgggaaaaatttacgtacaatgtaatatttttttcttttttcttactgacttaggcaagaaaatattgacaagaagaatcaatacaaactcattcagtgcctgaaagcgtttatgaataataaggtaaatggtgtttacttatccctctgttacaaaaggagagagcttgctcgacagtatggaagtaagaaagagataaaacagtgggtactattcaagttttaataatatgtttatggtgtagatcatcatgagtttcctataagtggtttcaaaggtgtattttgcttcccgcaatatttactgccatattttgcatttatgacaagaatattagtttagctttcaaatttgttgacacatatttccttttgtgatataatgaagtctcattttttaagctttatttatttatgcatgttgctagatgagttgatgtgcaggacatgcctacaggtgcccattcaggatagaaggaatcagatcccctagtactccagctacaggcttgagctgcctaatgtgggtgctgagaatcgaatctggattctctataggattaggtactctcaactactgaagcatctcttaaaccctagcagtatgtaaatttacatttcataaattgaatatcatttccatacaaagaaagaagttgtattttatttaaaaggaaaattcaagggtaggaatagggttcaaatagtttgataagggtgtcatttcagtttcagtgatttaacatgtgtaaaagaaatctgtgggagatagcttgcatttttgtatacatacaatactatttttaatatataatattgtggagtcttacagattaaataactgactaatatgcttaatcacattaattacatttagttgatattttaataaaaacaattacttaatagaaataaataattatagcaataaccaggaacttgctaaatgtgagtgatagctattaataatcaatgcagtaatactgtatatttacataatatacaaacacgttctttggtatatgcaattatatatcactttctgtatcatatgcccatattactcagcaaatggtattattggtacatgcagtacatggttgctaatgaactctttcatcacatatacttttactgctatttctataagtttattatcattttacatttaattatggatatgcataatgcaccaatacatacatgtgaagtccaaagtacaaattgagggtttcacctctctccttctaccatgtgggtcccagggatccaactttaattttcagacgttttatcaagtacctttatcccaggagctaccttgcttacccatctgtatgtttcttgtagaaacactcctatcagtactggtcgagaacttctcttcttctgtgcttttcacctttagatacaacacgtcatggcatccaatgactaataacaatacgcttaattgaacattgctttctccagagctcaagaagcatctctttctgcaactgaaaaaagttgtaacattacaaaaagagagggcagtactggagatcagagatgcacatcacatttccagtcctaagcagacggggcctttgaaaaatgacatagcccctggccaatcagtctcctcctctgtaaattcagcaatgggagcttttgtgctacatttttattgattcatgttgtcaactaacatagttttgtaggataacaactaattataattagaatactgactaaagtatgttatattagtttgtaggacttcctttatagccctattcccataggagatactcagatatggcaagactcactttctttttcttatgtgtttttggcagttttgaagaacatgatgatttcatttaagttattcgaaacgaaattggagtttttgtgaagctatttttatgatttagatatatatccttgtcacatgaataaacaagtcctttaaatgatagtcatatgaaacaatgcataaaacagacattctgaatagaaagcacacagtgatatattcactttaagttggaatacattttccaaatcgaggagggtaaatttcatctgaaatgacataaatgacacttgacgttgaggttagttatgtcagaaactcataaacatttgcatgttgccttatgtgttaaagcccacagtaaagtcttatttaaaaagtttagcctgctcctcttttctcttagaatttaattaagaaccttcatgctgttcctatgtttggtactttgccaaatgttatcatataatgtttcccaatgaaatgtaatgttgccatggaactaacttgaaatgaagcaatttttttcagattcttaactgcttatagtatagcatattgattataagtactgaataaatggacaattttaagaaaacatatgcactcacattacaaaccaagtacagataaactacatcattaaaaactatgatagtatgatacacagcatgttcacatggatgaggaatttgtgggtgtttctgggtgaaacatgaaaaaagcaattaagaattttaattaaaatatcaataaagatgtcacaaattttatataaaatctaattcattttatatacatttcccaagaacaatattagaattatgttttactacaagaaaaatataaatgaattttacacccacagctaaacaccgaactgaactggaatccagttgcagaggagtgatgagcaaagggatcaagaccaggctggtgtaacccacagaaacagctgacctaaacaagggggagctcttggtccccagactgatagctgggaaaccagcatgggactgatccagaccccatgaacacaggtgtcagtggagatcacagaaatctatggggttgttgtagtagatcagtacttatccctagcataggaatagactttgggagtccatcccacatggagggatactccctgagcctagactcattggggtggacctaggccctatcccaaaggacatgatagactctgaaaaccccctatggaaggcctaaacctccctgcagagcagaaggggtatgggataggcaatgtgttcgtttggggggaggcagagggaactgggattgacatgtaaaataatcttgtttctaatttaaataaaaaagggagagaaaaaagaagcaaacttttactgagaaaacagaaatatactttgtgagacaaaggtgaaaatagtagcatcttaccattaattttggatttgaaaacctacctattggcatttgtatggcatgtgcttatacacttaggtttatgcctagaaaatgagtgagactaatattttctttgcctgtctgactggggtatgtctctgagtctataatatgtgttgctagctaagagatatgatataaaaggacaaggaaatcggggaaaacccatatcatatttttagtactttatcgactatatactatacttgaagcacttaagcatttttccctcccgtgtttactttaaatttcagtgcaaatatattggaaaaaattaaccacaaattctagacattcccaaggatatcaagacattaaaagtagctttagaaaatataggcagtgtatgttctatatgttcttgcttgttagacaaataccagttgttcccacatttctcctatatattttcaaaaatgtaattgaggaatattggaaatcatttttattcatgccctcaaatttctaagatgtagccatttcaaataaaataaaacaatgaatgattgcatttgaggaaaatccaaatcattagatacctaagggcactgtgaaggtattttttttgaaacatttctttattttgggtttatttggaatgaaaaatatgttccatagacattcccattgtgtttgtttttagtttggactgcaaaggattctaggagatgagaggagccttttattgttggcaagagcaattgaccccaaacagcccaacatgatgactgaaatagtaaaaatactgtctgctatttgcattgttgcggaagacaacatgtaagtatcgacaggttctgtttattgtgttgcaaaatgacatggcagaaattaatggttcttctttttgataacttgcagaaacacagtagttcttagaatatttttggttgatatccttattttgtttgtattttacctttttggatattatataatctgaatttgttaaagatgaatttaaaatattcatttattcaactggaattttgtctcactgaagataacatcagttaagtggaaatggattaagttgaaaacgttttgagaacacataggaaacacacacacacacacacacacacacacacacacacacacacgcgtgcacatatgcacatgtgtgttcaggcatctttaattgaaacaggtatatcctttgtactattgtatccttgtattttactttatcttatatggtaacttaacattaaatgaacttatccaataaaaagaaaacatagtgtaagtttgtaggtaaatgtttggaacacaaacaaaaacagctcataaaacattagcatatgatagtaatatgtatattaattagctccagttagctgttccatagcaggaatatttttaaaaacattgtattatatactaaaaatatttgaaggttttgtctattaaaagtattgtgatgtgaaacatttaatggtctatataaacatcaaacactaagaataaaatagagaatgagctatgttcatcatatgaaatattcctcatttcctttttctcttgttttgtctgtagtctagacaaacttttaggggccatcagtgctgcagctgaaagaaataacagagaacgattttcaccaattgtggaaggattggaaaatcatgaagccttacaactccaggtggggttgttttatcataaatcacttgaagagttatatttcgaggacctgtattataccaattcatttttagctggcatttatgggatggaatgtaaaagtacaattatttgtgttactcatagttttgttcatttaaagtcatttaaaattaagaaaattgcttttttattgtcactaatacggcatatgttattataattgtcgggaagttgaagctttagcagtaatatgggccaaaggacatacagttaggtctgtagtatttgaccaattaataaagctataggcttttgtagaaatgtaagaaaatagttaggtatggtgtcatagtatggtactctttagcagtttgaagtctgagtcaggagggttacaaggttctgacttgcctgggtttcaatcaaccaaaaaaacaatttaaagaaagagaattcagtatacttctctttgtgcctttcagacaatcagaaatcagactcactaatgcagagggactgaattgtatcccgtgtcaggcaccctgtgaaaactctgtagacccagtctaaacatgcttagttctaaaactgaaaaaatcttttgtttttcatgatttcaggaaatgtcttactttatgaaaggatacattgttcttgagggatgagaagtcatgtttattgcctgtatttacagataagagctgctgaatggcacattttattttgtgaatataatttggtataattcttgtaatgaatcagctccctaagtattatccatttatcatgtggataggtagaatgagattgcatcacttgtataagtggacatggtgtggaagaaccagaatttgatgtcaacatgctctttgttttagatagtgtatataccatttgatgctccacgaagtatcttttaaaaagttatatcatcactcaaagagattttgctactatgtttattttttcaagttatttttgtgagtatacatatggaaatattctacttgatgtgaaacaaacaatcgattttttttttttattgttttatgaagtattggcatcttttctgtcacagctggaaactgtgttcggcagctgaattggccactccaaggagaatctgtagtactgtgaaactgtacataatgtttctttagaaatgtaaaaatatctttgaaaattgttctacttcaacgatgatgagtatattgataaacttctgttgtattctcttttgcattggtgtttttaaaattgagaatgtccccttagtgttttcctatctgtgacacagttttccatattattagttttagtttcactaaaatttcatactttctagggaaagcctgagatatgcattttcagatgtcttctccagtgttttgtccgtgttgctgtgttggctgtgcttgcttgcctagatggctttcactgccagacatacatatacgcctgtatgttattttcaaaatttagcatgactcaagcttgttatttagattcaaagttttcattgcatttgcaacggtttgccatatgtggcacaaatagatttgaatagttaaaaatatttaaatgaaatttcagccacaattctgtgttatatattaccttaagtttactgatcagggaactgagttgcacgaaggcttcatgattagttctctaagaatcacaaagctgttaaggtttagaatggtggtttgaacttaaatttttgatatatacatcccaaattatattgtatgtccattatagtaacacctccataaaaaagcgatgttttcattgtagagtagtttgccccagtcagtgaaactttactgacattctgtggctttcatggtgctgtacagaatagaatgattaagtcgcaactgtttaacaagtaccatatggagaaattgcagacatcttgctaaatattcaagaaattgttgaatactgattatggatgcaaacatatgcaaactacaatttgaaatttcctaatttaatgagctacaacgtttagtaatttattatatacagagcctagtactctcccaagaattgtgaagtgggtttattaggcatatttaatgtgaatgagaaaatattctgtaaaagttctaaaatgtgttcagaatactgaaattaaaaacaaaagctgagctctgttgtttaaaaaatgtaatttgtgttttttttttttttttgcagaattacttttcaattttggtagtgtcctgagatctcttattagaatatcatgaagtaattcttttaaaatactgaactaattatattttaaagcaacagtttcttacagatgttttctagctcagctatgataggattttcattactttcagtagtttcaggaacagatcagggataaattacatcaacatatgtactctcttcattgccttacgttcagcttagttgcactattcagtctgccatgctgtgtcacctgcagttttacacttgctagcctctcatctgcctttttaccttgtagcacttgtctctcagagaacaatctatacttctttcctctattttctaaattatctttcacaacttatctttgtcactgtcttaaaaagaaatctttaatggtctcataatttcaaaaccaatgatttcttcccaatggtggctttgtccactgaccatttgacaattttacttctcttgcttctctgggcaccactctttttgggtggtgtctgaatacccatttattctgtttctaatgcatttttgctcttcttcacaagaatatttccactattttttaatcactactttctaccaataatcattttatatgcacctacttatatgttgttatgtgtatatgtgccaacatgtgtatgtgctcataaatattcatgtatattcatgttttttatcagactcccacaagtaacaaattaaaaatatcacttgtgagtgctattccacaataacattgcaatttacatatgtaatctcatttaaattacacagcaaatctgagaattatagaagtatctcatgaggtgatatttgagttggctttcaaagataagaatttcaatgatattatgttttctaataaagaagccataataaatttgaatggtgcaagaagggcttatagtgcgtgaaaatggagacctccatagtctttgtaattttagaaatgaaagcagaagaccatacagacatccgcttgaactttatttctgtgtagcaagacaggaaatttcaaagtaagctaaccattagtagtcttttataggtagagaaggtaacattaacatccagtgaatgcatgttaaactcatccattttctcaggctacagttaggcagaaatctttcatgtgtttgcagaatttcagaagttgtggagacaaatgtggtagcatggtatggtagacattaaactgctttctagtatatcagaataatggagaaagtcttctggtataataattgaatatagtacacaaaagcatttcacacaatgtattgttcataatgtgtgatagcttctctcaggtatactacatttacattgtataggcatcctcttggcatataaattagaaccaataatgaaatgaaggtaaaaatcaaacattgatccttcattgaaatcatcaagtctatcaaaccggtttcatgaaaagaaagacctggcagcctttaatcagaacctaagtttgttttcttgcattatcatattgagactgagcatctgatttctgttcatggcagactaagggcacaagttggaagatgtgcaggaagggagagctaagtagatgtttagtaaacttctgaaactaaggtaactgccaatgagctgagttccaagtttatactacttccgtatgcatgtatatttgtgtgtgtgcatatgtatgtatgtatgtatgtatgtatgtatgtatgtatacacgtacatatacacgtacatatacgcatacacatacacatgcacacatacatacatacatacatacatacatacatacatatatacatacatagtagtgtaccattgtgtagacaaatttggacaatagtgttaccttttcattgtaacaagaaaaattctgacttcaagtataccttcacttttaaatctgtttcaaagatgatgaataattgtgtatattattacagtagtaggtaagagtgattctaagcgtttgaaaaggagcagactactttcaaagctatcacattgtctttctagcactatttggcattattgagcaggactacacatacttaacttgtgcccgtccttttcggctcctctgtgctttcgcaatgcttcttttctgtgctcatctccttcttcttctgccagtatctgccatttcattttcatgtcaaaaatattcacgaacctccctcttaggataactttttccaaacctctcatggatccctttctgattttaggatctatgaccccatatacacctgtgaaaattcaaaccaaaggtttgtgcatacgagacaaagttgtatcttgggacctttggttcttcatttttctcattttgatgatttgcccactgtcttatccatctttctgagttcagcgagatacatgtttgcctatgctctttgcatcccagtccattctccctttcaaacatagaatgttcaagttctgcattacatttaactatgttcatcttcaagttatacatcctgaacctctctaatgtcttttctcaccacgacctaccattttcttatattccttccttcctgatcattatgcaagaattaacatacaccaaaaatgtaatagttggcttcaaatccacctgtaatatatatatatagtactatatgtcttgcattccttcagacagtacatactggattgtatgttaattttgtacttctttcaaggcacagtatctctctaatcgctatgctgctgccagtagttattttttcttttaaatttcagggaattctctttattttagtctttgtgctgacttctttttattaaatcttctacccttcattctaaccctttaaatactctccggcaaagtcactcttctgacatgccattttggcacatcactacttacaattcttcaaaggctttttatgacttctaggattaaaatctagtctttgtgtccctccttcccaaacgaatagataaaagcacgtcaccacctgcttacagatttctaattgtgtgtttcactagtcttctgtatacactttttgatggagtcatactacgctctccttcatgaacattttgtgcaatttcctctctctacttctaatcctttgtacataaatccttcttttgtctagacattcttctccatttcttgacttaattaacttgcactgtacatttgaatagttcttagtaagtacttattttgacttaaacaatctttttcccccaactcctgctgtggctaggataaagaaagaccttgttaatgtcagcagagcacttaataaggtcaaatgtgtgacagtgtcaataaaattttaaaagcaatatttgtcacagctaatggcaatatggataatctgtctgagaatgccctagagttggcaattactgtactccataactctaagaattgtgatcaaacaggcagacaattttttgcactttctgaaacttgttagttgaaataaaagcttctcttattttcgtagttattttgtgaagacattcctgtatattttaattttattcatgtattttatatgcacttataagagcatgtatacatatctagtacatgggatgtttattaaatgcatatgaataaaatacagataacatcaaattttcctatgttaaaaacaatttaataagaacaggcactgttgtacttacttgtttagcataagaattatggtcctaccagtgcatatttttattcaatgagcaaaatttactgacttcctgtgatatttttaaacactattttttcattgactctatattagaagcacaaataaaaaatggaaaaaccacattgaaagttaaagcccttaaaaaaattcttaaaaacagaagaatctggttattggaatttgtgctattcaattcaagtacatttgtattctttctggtaagaggttgaagttaaattgtattcagcaatgctagattggcacattgtaatgtgtagaagactgcagtactacaataagtggtgctagtttcctctttttggcttattagcgttttcagttgagggagatcacttcatgtttgtaacccacatatgaaacaatattaggttgtttacttcttttctttggagagggattattttaaaatcagtttgattttgctctctaagaggacaatagagttcagtcacatgtttaaagatttatatccttgggtgctgagcatcaaagttttggtatttgggaatgaggtttgtagtcatttcagtctgagctctaacaggccagaaccccatcttccttaatgttccccatggagttctgttctgtcaaattttctgcagtattttttattcatattgtccaatgtgggacctataaatcacatgtatttttcatgccattggactatagctagtcaagtcaagttcttgatttagttcctattgaagttaatctgtggttaaaagagcctggtttgaatagtagagttctgtaatatacatgtacttgtatttgaatgcacattctcatgtaatatggaactccttgggggagagcaaaagggaaagaggagacattaatttgactatgggatgctctcaatatgatactttatgagatgtatatggaatgacatgtactccaaaccaaggatcagttcgtccttacctatttttatttgtgtttcattatgtatttggtaactcctttatatatttggtaacttcttgttctagacaacatattgttacattatttccatgcttttataattatggatagctgtaatgtagatgttctaattcaccaaacatgatgctacagatacgttttgtcaccttatacaaccttaaaatttttcttgtattaatctttgtgtggagtttctaagatatctgaaacattctggaattgttttctacttgacataaaatagtgtaacttagaaatataattttcttttgctatttgaccttgcataagtcatttatcttctgtaagcttcaacttttccatgtgtgaaagaaatatagttgtaatttacatctcattgttttctatgagagtgactttagatagtacattatattaagcacctaatacattgtctaaaaatttataaaaattatacaatagagataagagtgtagatttttgcattcagctatttgtattttgtatattggatccacacaatgatatttcataataaattgttgtgcttcttgaaatattatttaaattttcatgtaagatattttgataattttagtttttaattcctaagttattgttctctgaaagaataactgtagcatagatgaggacaaataacagtttttttcttaccttactagtaagtgtgtgtttaaatgtaattccctaggagttttaatattgcagttggcatgttattaatgagagatcttgtagaatttggtgagccataattggcattttgttacctattcttttttgactactgtctttcagtcatatcctacttattttatatggtagactctatgttcacctttttttaaaatatccagccatgtttgtatacattatctgtaaagtacttcatagcagtgatatctttataatgatatatgatatcatgttgctgtagttagtaattttaatttttactattttatttcattagtacaatacttctatttctataaagatattgttacaagatttactaacctatttcttatgagaatatagtctttatttgtaaggtattaaaatatacattattaagctagaattccttctggcaaaaagaatactagcatatgtaaacatttctattaattttcaattgggctttgtcttgttaagtcatgtcataattgttacttaacaagactcattcaagaaaataatatagcactgcatacaatatataaacacatatactagcctattgagactctataaagatttattcaggttcttattgtataaaggaggggcctgtaatcaattagaatgaaaatgcctaacaacacatccagtattagttttaaggtgatgcaaagttttttgatacacatttagttgtccaaatgtttattctaggaatacctgagcattcctatgaattggaatgcagtgttcaattactttttctctatgtggtaactttgttaacaagctcagctttctattttaaatgaacaaacaaaaaaaaaacatttgaatttggtatattacatttgaacaataagctgagtgtataacattttgatacaaacttaatgcaatatatgttttaatgttttctcattgttttgaaaaatgatatgtaatgcaaggtgtgttgaagtcaacatatgcaatatttctatcaaagtttgttttcaacatttttggtttattcatctttctatatatgcttataatttttgtaaaatttagtattttccttgagtttccttgtactctactcttctgctcatataaacaaccagctacaccaggacatggcagcaccccagttctcgagcaggaagcagtcttgagaactctatgcccatgttccctaacctcccatgcttaactccccacctttttaataataagtaaaggtggaaatgaaaggttcaggcagatacctaggcagctcgaagtgccctttgttgcgttgccacgtcatggctacatcacacattacaggactgtgtagggagggagtctgcacatgcgcacgcttcccattttgagcctgcacccttatccctcctctctctctctgtttccagtgttcaaatgctaattattctctgttctgctatgctcttgccttcctctctctctttgctctctcactcgttctgtctctcttactgcctccccacccccacgctcttgctctcccaccctgtaataaactggttcatgtactctctattgtttggtttccatctagtggtttcttttctaatttttaaactcttacagaagaacaccacttacatcagtttaacgtacttccatggaaagaatacaagctaatacagtgatatctcaaagttatctaatatagcttcacaaaatttttgatttatactggaattttttttaattgttttcccgagacagggtttctctgtgtagctttgtagaccaggctggcctcaaactcgcagagatgtgcctgcctctgcctcccaagaggggttgagggagtgagccaccaccgcccagctggaaatgtttttatagctatgtagaaattagttcccttactatctgtggaaaccagatacaagaattcatttcatgatcttttcatagggttcagtgtgtattatttgggaacctgaagtttctttgggaaagttaatatcctttcatatagtttagcaaagcaaacacacttaactttcatattgttaaaattatgttggatatcataatcttgattgctaatgttgcttataatacgaagtcttatcaatatacttacagaaatacttgcattccatatgcctttagtgaatctgttacctgcatgtattagctaagtatttctttactgtacctaaatatataaatggcatttactttctctttttaggtggcatgcatgcagttcataaatgcacttgtcacttctccatatgatcttgattttcgaattcatttgaggaatgaattcctccgttctggactaaaagaaatgctcccagtaagttcaatgtttctatttattgtactactgaacttttaacttgttttccctttcaagtaaaggtacttttttttcaaggaaagcacaaatttgtcctttgttattgcttcaaaaaaacctgcactttgttaataatttcactatacaatggatgattcatcagtcagctaataataggatgtatataaatatgaattatatatacatatatatttgcaaatttgctttcctctttgatacttttgattgattttatttatagtcagcataagtatgcatattgaggcttgactagtatatttgggatattttgcttaaatatggtattcttattaggctgcttcagatcttttcaaaagagaaatagttttaattctttatgaagtccatagtaggaattagaatcctttgactatatgcctaagtgtgatataactgtgttatatctgtcatattccttttttactgtgtaaagtttgtttaagttgtcaaacatttattttattgaaaatgtatggatatatctttcagagtttgatatttgatatgaaaacttaccaatagatcaggattcataaatgtcacccacacccagagggcctactttggttccatgtaggttctctaggagctgtcagctcagagtctatgagctcctactagcactggtcttctgtatccctggatttccccattttgttcttgccccccccttgctccaggagatcagcccaatgcttggctgtgtgtcattgcatctccttccatcagttactggatgtaggttgtatgacaattaaggtagttaccaatctgattaaagaggaaggctggttcagacaccatcaccactatttctaggagtccttagctggggtcatccttgtggattcctgagaatttctttagcaccagatttctccctaaccccataatggctccctctataaagatatctctttctttgctctccccttcaatccttcccccaacttggtattcttgatccctaatgttcccataatccatccccaccattccaccctgcctcccagtttaccctcctggggcctcccatttgtgtccttcttagggttcccctttttacctagcttctctgaggttgtggattgtaatctggttatccttgctttacatctgttgtccacttataaatctggtactgataaaacagtagtgttgaacacattttctttgtaaagaggagaataagtagaattacttgctctgaaatgtattttttgatgttctgaatgtgttctggttgcaactgccttctgtgctcatatggtaatatgacccataaacattacataattttgtattctaataaacctcttctgcttgaaagtggctggttatatcaaaaagttcttagtttaaaagaaacaaagtggaaataattttatttgttacatgctttatatgagtgtacttaaaatatttaaaatgtattttaaatgttttatagggtttatttttatatatttaaatgtgttaacaatttggtacattcttaagtatggagattcaaagaaagaacatcaaaaagtgctttgttttgtgttttgcttccataattgccattacatccctatttatcattgttcttcttgaattaaaatagaaacaaaaatagaaagaagaaatgcatcctgttttctttctttacctaatttgaagtacaccttgcttgcatttcctttcagagttcaagctcagctctgaacatcataatcccagttttggtatcacccttgagcatccacagttgtgattatcgatttgagttttcaaagctgaaacttaatggacaaatattaaaagattttcctggtgatatctattaagcccaacaatctctagtctggcatgtttccaaaattttcatattattattatttggaaaattataagaggtttgtaatgcatgtgcttctgatgtattacaaaaacaaatctttgatgaccaagttggtattttgtaattaggctaaatgaaaatcaaagtttggcagggcagctagctatatcatgaatttaaaaaaaaaaaaacttagtaccttttaactttaaaatcacaaaatatcattcattataaatttgtttacaaaatttttctaggccgtacttgggactgttgtgcttgaatatatccttgcattggtttttcattaacacaactgatctttattgcttcattttctcggtgccagaggcacctgtgaatgttctaactgcatggtttcttttgtgatttctgatgagtatgttccgtcaaaacgacagcattgaattgggttgtagctattagtgggatttttgttgttgttgttgttgttgcagaagtgattgttaatatttttaatgtgaattgcaagatttagagcatggaaagaaaatgtaaagaatggtatgaggttcttccattttgaaatagaaatctttagctgtatttattttcttttaggaaagcaaggtcaatatttgaaattgcatctgtgtacaaatgagtaattttattctgcccctgattagcaggtgtgttatttttaaattgtcattcattttctgaattttattgttatattagggtcttaaagaaaaagagaatgatgagcttgatattcagctgaaagtgtttgaagagaacaaagaagatgatctaactgaattatcccaccgtctcaatgacattcgagctgaaatggaatatcctttaacaaacaaaataaatacctaatttttacacttaatgtttaaaagcaggacttgaggatattttttatatttcattagtttttttttctatgaacaatgttgtaactgcttatttatattagtgctccaccatgatgctatccttgatacccatttgtgctgacaattgctactttgctttgatgatgtattcagactattgaaagccacacaattaattactcagtgtattagagatacactctgctcagtggtcttgaataaacaagagcctaagagccttaagcagtatatatttccaagaatgagaaaaagttctttgagttcatatgtgataccagttaagagatattttgtttttattaaatgctactccacttatagatacaattttctggaaatgagtatcttatttcttatcgggtatttgtgttccttaatgatagcaaaattgttagatacaataggagctttctataagaaagtagtgctataaaagtacctacatcatatataacagcatataatcttcctgtgccaactgtctgatgtgaaattgagacataagatatgattgtcacagttctgcaacttatctccctcccattaaaatttatacttttggattctatgaagtaggaagacacttgcgaaccaaagtaacctctgagctgtgcttttctacctttaatattttcttatctttcttctttcggtattctaaacaaacttgaacaatatttccctatttgaaactcccttattactttatttgacttatgtgtttttatgtactcttctcctctctttacatgaaaatattgcataaatgtagatacaatgtatagaaatgttattatcataggaaataattaaaaattaaagtaattcaaaattaataaaaacagtttttaatcaataaactgctttatatttagtgatataatcaattatttgataattttgtagccattcaatgtccttatgttactttaactcagaactctgatgtggtgtttaaattagtgcattgtatatttaattctactgcccatttcatggtgtttcaagatgttggattgcatcttgtcttttacctttattttatgtggactttcaatatactcagtacatataatgtgagtccaatcttgaagtttttttctagactactaccagcatctacaccactagtttttatatcccaaagaaaaaaaaatgtcctaatgtccatggacttttcagaaggtcaagtatgaacacaacagattttagactttttatttgggtatttaaaataaagctaggtttgtgatcttttgatagctgaatacttgcttgatatatcttttatctgaggataaaaatagaatagccctggctcttttggacccatagagagatcaagacaaagcctccttcaccaatagctttgctatttgaatggtcctaactattatttgaagttgataatataatggatgattattattttttctgtagatgtttaaatgctgtatcatgaaattgaaaccttattaaccataatggaaactaagtagtaaatttttaatttaaaaattaggctgctttagtcataaatgcactgtccattaagaatctttgatgttttcctttactttctttctaccgatatgaatgaagtctaccatcttctctataacatgctgaaagacactgcagctgaaagttacttattatccattctgcagcactttctactcatcagaaatgattattatatcaggtaaggttcatatgtgagatgactacatgtataatttgaattggatattaaaaggaagttaacaaggtagtagggctgaggaaatatatatgttatatgtacataaaatataagtgttttactacttgaggcaacatttgaaaaaaagaattcatttattttaattgggccaggaaagataactgcatataactatggtgtgcatgcaaccagaatgtaagtataaattaacctgtcgtatattattgaatatgtaataaatttttctgcttgatactgctagaatgtcttaaatcctcctattttaacaagtaaagttttatcatttctttttatagtgtttagtaaatgtgtgatcttcaaattcagaaaagtattgtgtatattttactttttgtaaaatatgataacatatagagttatactttagaatagatgataaggtctatatctaaaaactggaagcatatatagcaagaggcttatgggtgactgaaattataggctcatgaccatggtcttatgttaatgacagttcaaggtcctcttacttgctttacactcttctatgtttgcaattattacatactagtttctttggattctcaaaatttgcttgaataatagaaaaagaagtgatattagaatgctagttgtattgttaacaaaaattgataattctaaaatagcatatagagctatttttttcttcattctactgcagtgattggatcacatcatgatgtttaggagacagaaacatgttgaaactactaatgcatgctttttaaaaaccactataaattaaaatacataattttattatgtatttattatgtattcatgattattcagttacctaggaacaagatttgccagaagtacctattctcaataaatactaataaatgataaaacatttacacatggcatccttaaaaattttgtgttatatgagtatgttctctctctctctctctctctctctctctgtgtgtgtgtgtgtgtgtgtgtgtgtgtgtgtgtgtgtgtgtatgtatgtatgtatgtactatgtttgtatgtatgtatgtatacagtatttgtgtaattttgtttccgtgaccacagacagaggccagaggtcaaattggttgttgtgctctgttactttctttcaatttatcttgagacagtgtctttctcactgaaactggaggactactgtcagattcctttggtccttctagcaacaccccagacagttacagatgtgcatatccatgcctgcctttttacttaggttctaggcatttgaactcaggccctcctacttgcacagctagtgcttctatctactgagctatctcctcagccaataccatctttcatcttaaggcattcctgtgaggtagaaatgtgtgacaggtgctttcattccatatgtagacttaataaaatccccctcaaagagaagagttgtgtttttcttagttatccaaagagtgctcatcacactgaggttaaggactaatactattcatctccagatctgatggtgattttcaaatccctagccatgcaatacgtatttctttttattcttagtcttaggaacaaccacatgattaaatacacagaagggtaattagaatctctttttcattggtttagagtttttagtaggttgacaagctatggttagtggtgtttatattgtagtttgtctgaattaatacttttctacaatagtgttgaatttattaaccaatgaaaatttgtctcccacaaaatttaaaagcaaaatgtcttttatttttccttttccagtcagcaatcattattaaggccagaattaccttgggagattacggaagtgtgatgtgtttttaaaacgtttgataaatcacacaaattactgctatagctgtgcctattaagtgtatatggcttcataaaatagatgttttttgaagcatgttgtatacataggtttttgcattactgtgtaacagaaatgcctcagtccagttttataaactggtgttactgtcctgagtaaatgttcttcactgaattcaagacattgcttgccacctaatgccaagaatctcatctttttttgaaaatgagtgcttgtggctgtctagagctatttctgtgctcatagatataggactagggggttattcattttcattaactttagaaacaataccttaaataaatagatggggttgataagtatttttgaacacaagcatgagtccctgcaaactagcatattaagtcagtacatattttcagtcgatcacatcacactcaatttggctccctaatgttcagaccatctttaagccttaatcatattttctctaaggaagtgcaaatgttagtggaattattttcttattggtgctggagaaaaactaagttcttttagcattctctatcccttcataagaaaattgattgatacaagtagaaaagtattctcaaatattttctctcctccttttaggccacagtattataaaataattgaggagtgtgtttcccagatagtgctgcactgcagtggcatggacccggacttcaagtacaggcagagattagacattgatctcactcacctaataggtatggattatactctatactgccattcatgggtcacaccttctgtatactgagcacattgaaagggtaggtctctcactgaactctcttaaaatctggtaaatgtttgttgttatggatgctcaactaatacaactatttgttttgagaatcataagaattctctttataggttcagatatattaatctttttgataaatttcactaccacatagtcagttgacaattagttgtcatgtgtcacaaaaatccatgattttttttttaaataggtgcatgccttgctgtttaaaagcatgactttagtatcttttagttcagttcatcctcacagaaagattggggaagttatatgtgcaggagagtctcagtattatagacatgttactactggctctcaaatttgagaaaagaaatgtcatgaaaaagaaaatagctcaagtaagaatgccatgtagaaacattgttgtaacagtctgatcagtgatgacaagcttctcttttgctatatgttatgctctatggctctgtagtaggtaattgtatttatagatggttaaaactatcattgactaggatgaagcatgaagttgcttgtttttaatgaataaaaggttgttgaataccatttatataatatttttcactacattgcagaggacagactcacaaaggagtcagagatttaacattatttctcataaataattttttgtttcttactataggcaatttagagatttctgtaaatgacaaatatcaactgatcaagatcactaccttttaaatgaatacattttaaatagccctttctttatgcacatgtctgcctttgaatgtaactacttctaagctgaattttcaatgagcactgtgaaggtttgactatgtttgcattcaaattggatctgctaactacatgtcatgttatgatctatcatgattatttgaaatactgttcagttattgttttctgttattattgcatctagattgttttctcatcctcaagattgtaaaagaatctgctaattgatctctgtcaccaaaaatgtattttaatactcagcttaattgaacattctcacatgtaaatgctggacattttctcactgctttttcacagttaattgttatcagtgaagataggaatttcaaatgccaaatatttttagaaatcttgaacctttaactatgtgagctacaacctcttctagttgtttttgaaaagttgatgattattgtggaactttcattagaatatccacatgcaaatacacatatacacaaagttatcaagggcttcaccctcctccataagatgcaggggtctctatatgaatatcacttggacctgagtattccagtctgggccgatttcacatttctgtacatcaaatgttttttcttaaatcatagcagatccttttctaaaactgttcaatggcttccattggaacttagatagaaatcaaagtaaaaatcattgtcagctatgacttatattgcccatataaagccagtttggacaatacaactttcctgattgtatggaacattctaacatttttacaacatgaaacacattaaatacttgtagccagagagagggcttaggagttaagaatacttcctggtcttgcagtggaccttggctggacacccatcacctacatgacacctcagaaccatctgtactctgcttgatcctatgtcctcttctggactttgtgggcactgcaaacatgtggtgaacagacatatattcaggaaaaagatccatacatataaaataatataaaacaatcaataaaaattgataaaaatctttcttatacatttgagtggagaaaattacttatattttaatatataagctaatcaatatatatatagctaataaatatattttaagtacattttttacactttacaatataaattaataaatgtatacatatattaatgcattgtgtacttaaaaccatcattgtatttaagatcataagctgtattaattccttaaaaatttgctgtcttctctccttgtttttccctactctactcatacactgggtatgtcactaaaagtgtcattgaaaatagaaatacctactaatctctcttatactgactttattttagcttaattttctctcaccagttttctttactaaaatcttatgcaactagtgtcatgtagcaatactatctgtgactatcttgtttcatcaagcatcatatgtttgagattcatccatgttatagttcatctattgatagtttgttcctgtatattgtgaagtagtatttatgtatgaatattaaacaatgtgcatttcttggtggacagttttgttctttccagtgttcaactattgtaataaagctgttatggttcatttatataaatgtgcaattcagacatatgtttcattttcctttggagaagtattggggtaatgcacatggatataatctaagattaaagaggtttttgcattatgtttattaactaggcctgaataattttatgtttgcttccattttacaacatacagaagtcaagtaaaagattttccctgaaaacctgaactgaagaatgccactgcgtcatcctccccagcgttttagaggatcattttgagttttcattatcttgaaaatggagtttttgcctccagtctctatataataatgtgtgattttccaatgaattctatagtggtaaaagttgaattataattaacgcctttaatttcagggacaatttcatctaagatatttattaatgcctgaagtttttgctttaatactaaagaaagaaaatgtggtattatttgtatattataatgtagattaattttcttttaatgataattcatgtgagaatttcagaattatatactttcagccataattagctagatatttcatctcaaatatttctaatcatttttgcttcatctgaatagatgcttgtgtaaacaaggcaaaagttgaagaaagtgagcaaaaagcaatggaattttcaaagaaggtaaatgccaaaataatagtcctgcattttaaattaatagttcaacccccagtatgtaagtatgtacccttaataacatttgattttgtatgacactttataacttgt

SEQ ID NO: 3 - DNA, 414058 bp, Cricetulus griseus
  misc_difference 16047..16356: note = n is a, c, g, or t
  misc_difference 56000..56014: note = n is a, c, g, or t
  misc_difference 112642..112675: note = n is a, c, g, or t
  misc_difference 373665..373906: note = n is a, c, g, or t
  misc_difference 387573..388011: note = n is a, c, g, or t
  source 1..414058: mol_type = other DNA
cgacggggggggggggccatcgcggtgaccccagcagtggcctcgctgccgcgcgccgtggctgagccgttccgactcctcggaccccccgggccggatctcacccttgcgcgcagcggagacagcggaggcggccacgggagcgtgaagcagcatgtctgacaaaatgtccagcttcctctacattggggacatcgtgtctctgtacgcggagggctcagtcaacggcttcatcagcaccctggggtaagtagggcgcgcactgggcagcgccagccggtccaggtctctgtccctcccgcgcggcgtgtccggggtctgcgcctgggacagccccgcgtccccgaggtccccgcgctcaggaagccgcgagcgcttctcagcaacttcgtaatctccagcccgagacacatccgagaagaggaagtggttcgcacgccccagacaggccccgcgaggcagccttccctggcgtctcctggcttgttttgattaaaatgtatgttttctcctcgtcttccctccccacggcccttctcagcgcccggctggaaagagtggtgggttgaagtccctggcttcggccacgaaagtaggcgatgttgcacagtgcaaatgcggcattgtcccgctggaggagatcaccagcccctcttcgctgaagtaatttccttttggccttgccaagggaagactcacccctttggctctgccaaaacgggcctcgtgggcagccggggttctagaactgggatcttcttttttcctctccatccccctcggccgggtgaagtgaactgcaaggctctggagattccagttggtgtatgcactggggaaataggtttgtgtatcctgcagaacaccagcgtgctagttaagtagggccttttgtgatttctagaaattccttacatggcgagctgatgcagttagttgcgccttgcgatatgttttagtgcacaggtgagtttccgctctttagactctaatctgggagacttgagattggtgactgttcactgttgagttttggagttctgtctcctgagctgtgacagtgtcacctgcccaatgccttccctggaagtcaccagtggtgtcctgttctttgagcatgtccccacagatttgggggaggaaggtagatttaattccatatctcctgcccatcagtttactccggagattgaagtgtggaagaactcagtgcaagtgtccagccgtttctgagagaattcatgctccaagtccagtttgggtccaggacagtgccttgctgacgaattctgttgaacttacacttgaaccttggcagacatggagggtgtctgccatttagcagctaaaaggaggggctctagaaacagaagggttgggctggaattcccaccctttgacttgcaaaccttatgtccctgggcaggttatgaaatctagctaggcttccaactcctcagtctaaaaatgggactcagtggtttctacacaggggcgtggggagcaaagaggtaagcgccgagcatggcagagctgtaatgactacattcaccagttaattagctgatgcagtaattatcgctgcatagcctaggcaagagttcaagggccaggatggactttgtctctgtagggtcactctgcaaggtcaaaggtgggtagtgtatgaagcagatactgggagagctaaggtggtccagcttccacagtcgtggagttgtctccaggaattgttgagacgagtcgtgaccactgcaagaagcagagggcctttgtgtccaaagccagaactctactcctgacttcgactccttgccaagcgtatgctactctgctttcccaagtgacttcagacagaaaaccagcacgaatgcagtgactgtggcaggctcagtggtgtcacagcgctcgctgtgctcagggtttcttgctggtgatctgaaagtggagtttcttcagaatgtgttcccagacggctatcattctctattcatgaaataatagtgttgagatgactggcaaggcagagtccaagttgaagagtcttgaacatgctgccctgggcggagcttgcagctttgattggatgtctgtctattgaagtagacgtctcggaggttcaggtagctcatagaactgcagaggtcggcgttagtgtgattgctcccccactcctgcactccggtatcaacaggttttcaaagggcagttacagaagtcattgctgatgttcccagatagaattttctggcccttggagaatggtgttcaaagggcactccagggcagcccagggcatggacttcagttggctgcatgagtttaagtcttatgaagtaagggaatataaaggtccttcggcatcttacttgacaagtcctgacatcttttatcagtactttctgtttagaaaagcatgccatttctttcacatttgggaaatacctaatagtgttcaacctgaaattattaattatcttatcaatataaacattgtgtgtgagatctgcaagtaatgtagaaacttcaaagatgttttcagaaaatgcctggcacatctgatggggcttaagttgtacagcaaatcatctcattgatttttcttattaatatgtagttttaaaactaggggttctgtcttacaaattttttttttcaaaattcaggagtgaaaattttcaactattgagaaataattacgtttagttttataatggcttaattaaggtcctggaatatatgggcagtgtcccattgttatatcaaaatacctaagattatcagtttgcaaggaggagacatttttgttctcacagttttggcttcagttgtacagtctatggattctgttgctttggaactacaatggcatagatggcaggtgtctgtgagcaggggacagagttggagcatgccaccagtgactcatcgcctgtccccaggtgtgtgtggtgtgtgtgtgtggtgtgtggtgtgtgtgtatatgtgtgtggtgtgtatgtgcgtgtggtgtgtgtgtgtgtgtggtgtgtggtgtgtgtgagtgtgtgtgtgtgtgtgtgtggcatgtgtatggtgtggtgtgtgtggtgtgtatgtgtgtgagtgtgtgtggtgtgtgtgtatggtgtgtgagtgtgtgtgtgtggtgtgtgtgtggtgtgtgtgtgtggtgggtgtggtgtgtgtgtgtgtgtggtgggtggggttgtgtgtgtggtgtgtgtgtgtggtgggtgtggtgtgtgtgtgtgtgtggtgggtggggttgtgtgtgtggtgtgtgtgtgtggtgggtgtggtgtgtgtgtgtgtgtggtgggtggggttgtgtgtgtggtgtgtgtgtgtggtgggtgtggtgtgtgtgtgtgtgtggtgggtggggttgtgtgtgtggtgtgtgtgtgtggtggtgtgtgtgttgtgtatgtgtgtgtggtgtgtatgtgtgtgtggtgtgtgtgtatatgtgtgtggtgtgtgtgtgtgtggtgtgtgtatggtgtggtgtgtgtggtgtgtatgtgtgtatgtgtgtgtggtgtgtgtgtatatgtgtgtggtgtgtgtatgtgtgtggtgtgtgtgtatggtatgtgtgtgtggtgtgtgagtgtgtgtgtgtggtgtgtggtgtgtgtgtggtgtgtatatgtgtgtgtggtgtgtgtgagtgtatgtgtgtggtgtgtatgtggtgtgtgagtgtgtgtgtgtggtgtgtggtgtggtgtgtgtgagtgtatgtgtgtggtgtgtgtgtggtgtgtgtgtatgggtgtgtgtgtgtgtgtgtgtgtgctgcacatgtggaggtcagaggctctgctggagattttgtcagtttagggcagatgacagtcacctagcaagaggcaatgtcagttgaggaattgcctctgtcagattgctctgtggacaagactgtagggcattttcttgattaataaagtccagcccactgtgggtggagtcagccccaggcaggtggtcctggggagcctaagagagcaggtcaagcaagccagggagagcaagccaccaaacacatttctctgtgacttctgcttcagttcccgcctccaggcctctgccttgaactcttgtgttgacttccctcgaggatggaccgtaacctgtaagccacataaacctaagtcgctttttggttagtgttttatcacagtatcagaaaagcaagctaagacagaggccttccaccttggccccctgcccagcagtgacaggagctaaggactacacccttaacacatgggcctttaggggacaaactgggacgattattattttgtaggttctttttattgtttgtttgtggttaactttttggaagtttttttttttttaaattagcttatgaagtcttcattatgctgttttctaaacatttttgtttgtttgtttctcttccccccgtcgccccctcccttgttcccttccattattttgacgccacacatgatcttttcatgcatgatttcaacgtgtagggctttatttagcttggggaaccagaagggtgtatgccccagccaagtaaaaatattttaacatcttttattattgtttgtgcatgggtattttgcctgcacgtgtgtctgtgtgtcacgtgtgcagtgcctgtggaggtcagaagaggccactgggttccgtagaactggagtcacagacggctgtgagctgctgtgtaggtgctgggaatcaaaccccagctcctgcaagagcaggccttgtctctggagcctcacaagggaagtcttagctaggtgattgtaattgttggagactctagggctgtgaagccagagcggaacaacagctgcttccctggctacatacgtgttgctgatcttcactcacaggcctttgtatcactcgcagagtagagactcctccatgggtttccttgctctcctgctccttgcgtccgtttctcaggcctgctgctaaccggtgcatgaccttgctcacaccatgtatctttttgtaagtcagcctcagtgtttttgccttggagaggatggatagcctccccttgaaggtatgaggcaatctagctccagagacaaatgaaagttttgtgaagtgaaaatgtatagggaacagctatatttccatatacacaattacaaattttcttcaaaggttaaggagctggtggagtgaactaggccagagttcaggttcagtaatcacgatggttacacgtgtttagccaaactcatatgttccactgtaatattccaaattccagggagtagctaaaagtgagccgtgcaagtctccgctttccatgttacctcttcagtctctggtacttgcagaagcctggtggcgctgccgattggaagcaggtgggctgtgatcagagctggctttataaagcacagatgttgatttacaaatgaattttgcctactcttaacattttatggcatgaataagctttaaaggctgttgtttggagtgtctgcagtgggtcttcactgtttttttgagttcaacacactcctcatggcagcactatgacaaaatgagtctcgtaagcttttcagggtgattaaacatagagttgtctctgtgagtgtgtgtgtgctggcatgagcgtcacagcacccgtgtggggctggagggcaacttttggattcagttcactcttcccttgtggttgggtcctgggagggaactcatcccaggatgtgagagctagtacttatgaaccatatcaccggcccttctgtgtggtttaaagacccttgagcatgtggctgcaaatatccatgtttcccagttttcctttgagtggtatttatactttggaaacagggttttctctgtgtatccctggctgtcctggaactcactctgtagaccaggctggcctcaaactcagagatccgcctgcctctgccttctgagtgctgggaataaaggcgtgtgccaccacacccagctgatgtttcttaatgtgtacctaagatctgtattatatacccttgtgttgacttgtggaaaaattaccttacatcctagatagtgtatatattttaaagaactgatttttttaaatgatgtatcctagagttagtttcctcattttgtttcttttctttttttctttttttaggcaagaagggactgagaatgcactgtgtagtttccaatgcagggcaattggtcctctggttttccttattttctattataagccctgctctccccatgttgatgccacagctcctagaagatacctatgtttctgactgcatccatagtcaggtgctttggaggtaggggctgagtagcatgaggtggtggggtgctcgggtggtagaaccagcttcaggttgtccttccttccctgcccactcacatggtttctgattaggaagtgaaaaggtgtgtgtgtgtgtgtgtgtgtgtgtgtgtgtgtgtgtgtgtgtgtgtctgtgtgtgtggtgtgtgtgtgtgtatgtctgtgagtgtggtgtgtgtgtgtgtgtgtgtgtgtgtgtgtgtgtatgactgcattaacacacatgtgcatttgtatgtgtgcatttcagccattgctgtcctaatgagaacctaaaatacatgaccagttatggacatagttggtagccacacattaagggcttagaaagctgcctggtgagcagtggttggcaatctgacttcagccagtcctagtagtctcttagagtgacaaaagccagttcaactggcatctctagtcacttgtttcgtcttcaatagtgggcatgtgtgagatgggtcacagtggttccagttctgatccgattcctctaggagtggacttgaaaatgcaggttatgttgttccaatcagggccccttgcatttctatttcttggtttaacttttctttgctgttgttttatttttaatgctgtagagatagggtctcaggctggtccctaactcaacagtgattctgctcaagagctgggatggaagcaggagacatcacatcctacatgatttttttttttttcctgtgaagcattcgggttttgctgtttttaataggtgtaggtttgattcatttctttttacattttttacttaactgttattcccattataattttaaaagttgtttgatggggaaagtccttctgtgtatgtttatcttattggttgtaaaataaagcactgttggccaataaggaagcaagataggtgggactaggagtccaggaggattctgggaaacgtagtaaagagaagtcttgtgatcctggcaggaagtgacatagcaggcagactctgaatataagcagggacaagcaggaaatcactctctttctcccccctcttctttgtggagtcgccatgtgatccccagcaagagagggcacatatggccggtgtcctcgataagatgcctttataaaatatatagattaataattatggttgataattaagactgagttagcaagtaagaaatcctagttattggccagcaacattgtacctaatataagactctgtgttattttgggcgcccacatgttggcgggactcgggcagctggcggaaagatttatcgttacagttgttcccttaacaggactgcaagtggtaggctttgttcttccctacaaatatgcagatagcctggcttttctcaatacacctttaaaattgacaacaacttcatatttatttatttaatatgtatatgtgagcacctatatgtgtgtgtgtgtgtgtgtgtgtgtgtgtgtgcgcgtgtgtgcgtgcgtaccatgtgcatgcctgatgccactagagaccggaagaaggtatcagatctccagggactggagtttcagatggttgtgagctgccatgtgggtgttggcagctgaacctggatcctctggaagagcacccagtgctctaaccactgggaaatctctccagccctggatgctgtctcaaacccagaggtccctggtgactcacacacagcttccagactctcgctcgcatcagcagctcagtaggtaaattgccatgctgtctcacatgcccagcacctggtggagagagacaagatcagaggcttattattgaggtctgaggaactgcagctcttcccacggttgctccctttggactgttcctgtgtgactagtgaggaaacaacagagaggatgcagacggaagactatggacctaaactcaacacactccatcacagatgcagggcatgcatcataggcagatgtaaagacgaagccatggattaatatgacaggtttacatggcaaacaataactgtacatttcacttaattaataagtaatgcatttgggggggacagggtccatacagtatctaaggattctttagtttcttttttttttaattttatttattatgtatacagtcttctgcccgcatgccagcagaggcaccagatctcattacagatggttgtgagccaccatgtggttgccggaaattgaactcaggacctctggaagaacagtcagtgctcttaaccgctgagccatctctccagcccgattctttagtttcttattactcttcatgaacagtgcttactttgaaaaatacaaacattttcccagtcacagtcaatggaggaaaacctcaaattaggcaacacagcacagctatggttattatttaagcatggatcctagttgctatttatgtttttaaagtgtagcatggtaaacatttgtctgagcagacgtgctgaacggttatgatgcctgacttattttgttaaagcgactgtgcaatctgccttattttcgatgtacttctgcaggtaagacacacacgtgtgggcatggatcatcggttgtgtcagtaatcctcatactaagcacgggtctcctgttgactggaccagtgtctaccgcctcagtttgtgacagtgccttattggcacgtgactgagataatccaggagcgttttagttgactattttcgacatggaggagtgaacactatccaaattataatcaataaatggttaagaatagctgtagaacattactcatccacagatcttcaatcttgaattgaggatgagttaaaatagcaggctgttgagaatcaaagaaaatctttaatgataaaactggaaatatgctgtcacgaacccagttcatgtgactgtcctcagaaagtacttaacgctgaaatgtcctatggattagctgattggcttcattcattcattagttgtcattgagcctttatgacaggctgggctttcatactgaagacagagtgtaaatccttttgttaaaagctggcttccctttgagaacttgtagtttgacatttggtggggatctgtggggacataaacacacccaacacctttgctctcaggactagaaaccaacaggcacttttgtgtcttttgaatcctttcatttccagtatcagagaatttctgagacagagcgaggactctaggaagcccctagaggtgtttcatgaatagccgtggacggattcagtaatgggcagaggagatgggataagaagagccctgtcaaatgtcaggtgaaggttagaaactatgtcacaggggcttggaagagccacatttcttcctgtcccgagggtctgacctggttgaaggggcttcaaggaggaggtacaatgtgagctcaactcagcatggatggacctctgtgtcattgtgacacccatggtcactggcacgttctcgacattgtcttggtataccattgtgacacccatggtcaatggcacgttctcgacattgtcttggtatacttttcagaagtcagcaaaaattcgttcttcactttagtagctctcaaagtcccaaagcaaatattttgatgttgttgaggccagcagagattgaggaacaatttgaaaacgtttttcatgcttcacccgatagggagatttgagcttggtttagaccccctgcaactgtcatgacatcttccagacactgaagcatgtgttgggtttacagagatccatggcaatgacactgggacctgggagcctagtcaggaaggaaggaaggaaggaaggaaggaaggaaggaaggaaggaagaaaggaaggatctggagtgtctttagacagtgcacccactccatgaattccaggcttctactcagttctccgggtctccaaccccagggttgtatagtggttgttttctctataaattgcctcctattgattgtctccagcttccctgggagctttgggaaaagaattttcatctaaaatgatggttttgttttgttttaaggtagagtctcatgctgtgtagttggggctgggctggaatgcaaaacgtggtgaaggctggccttaaacttggagcaatcctcctgagtgctggaattataggcatgtactaccacacctgacttaaagtccccctgcccctctcattcctgattcttggttttgctactgtaaagagcaatgaagatcacggattcacatgagcacaggggagggcgagggaagtcgacagggtgtaatctaagctcctatctaaattcttagaattcagacactcgttactgaggtcctatctgaagtaagatgtttgtcactgttaaaatatcagaaaaaaattctttctgtgctgattatcaagctcgggacttttattacgtacagtcattgttaatggacagtggagccccagagaagtccccagcagagcccctgcggctactttcagggatcagccagagctttccctgcacagtatctcctgctgaaaagtgcacatggatcctcagggctcaacataaaggccaaagggccaaataataagcagatatagcaaaagactggaaccttaaactaccctgaaggttgttcattgcctggataaactggcagattgaagtgtctaatttcccaaggtttctgagagggagatggcgtccaattcctgttccatccatatttaattaagccatttgtgaaccttgcagtgagttgtcttggtaacctcatgtaacagtttatggataccccttgtgcccggctctcactgtctgatcttaaaagacctgaaggaatttgtctatcacactgctctcacgctacccactggatgaagctggaacattgaatgactggctgagttaggctctttgttggcaataaacagaaaccatccctggccagctcaagagcaggaaatgcccccaaggacattgaagaatctcaaggcaattgaaaggagggttcccagtgagccatagagaggtgagaagcatggccacagggctctgaacagggagggggaatctcctcactgaatagcatcatgaatttgcatggggtccagcagttatgtatcccctgtctttcatgttaattgttttagattatggactagtagaattatttggattaggtaggagtcattacttgtggtggtttatcttggttgtcaacttgacacacctgagaagattaattaaagaattgtcaccatcggattggcttgtgggcatgatgatgggggctgtaaaataattaatgatagatataagaatgcccagcccactgtgggctaagccatctctaggcaggtgggctgggcctgtatatcaataaagccgagccaggagcctggtttctgcttcaagcatctccttgagttcctactctaacttcccttgatggtgggctgtaacctttttttttttttttgatttttttccattcatttatttagctcatacataaagtcatgcacaattatgatacataatacagtgtgttcacaatggcatggctaaattaaaccaattaacatgttatatcacacatactcatttttgttttgagaacacttatactatctcacaacttttaaaatatagcatattgttatcaaccatatttatcatgctctcagtagacctcaagactccacagagtccatgcctcttgtccaactgcagttttatatcctttttttttttttttttttttttttcccgtgacagggtttctctgtgtagctttggagcctatcctggcactcgctctggagaccaggctggcctcgaattcacagagatccacctgcctctgcctcccgagtgctgggattaaaggcatgcaccactaacgcccggctgtaattttatatccttaaaccaatcatttccccattgctaaaagacccacattgaagcctaatagccacaattctgctctctgttggtgggctgtaaccttaaactcaagcaaactcttccctccccaagctgattttggtcatggcattacaacaacagaaaaagctacctggaacattacatgcccgggaaggcagtggcactgcccagatccggctagtatcaccgagctaagctgggctttctgctactcctggggcagtgtagcatgggccatggcaggaaaggccatggccttcgtgaaatgccacaacttgcaggcaaggaaagctgtagtaaacatgtaggccctttgaagtaaattatgatatagtacatatactatatactatattgcttgatatcttggctgccttaagtgtgtgatcagctcaggggcagtgagtatatccaggcagccagggcttctatatgtcagagactccgtcccgtctgcatcctctttgcctttcttggtaacttctgaactcctttctatctctaggaatttgcttattcaaggtgcctcttgaagacaggttgcgtaataaccctttggtgactggcttattttatgtcataatgtcaccaaagaacaaaggtgagttacattgggatgtatgtactttaaggcagctaagtgtctatcaagaccaacttcttcctggggggaaagtatcagtgtaattgttcttacgaagtctttgagatccacagacagaatttagagtaggggagttctcacagtaactggtgccatcccatcttgctgttagaggtctttaaaatccagccgtggcaaacttacatcagaaaaagtaatgcatgcgacctttctttggtggtttgtagctgccgccacagtgaacgaaagttgatcccttcccagttcagttttgtccctataagcttgaagagtgaatttgtaagcacctcccagtctatttcttagctgagattagccctttgtcttagtggataatgaagaattctcctaggacagattgttttgctctaactcgtccagaaagaacttcctgataccaaactcagagaacagttcaggtgttaacatgcaactttagaaaaaaaaaatagcaggatgtgtttcactttgtaacctttatttttaatattcaagaataaatgttgaatgagaggcgtttaaatatttcaatttaaagagacaaatagctgttttttttttctttctgattttgattatatccattgatgtgtttggcccatgtgtaagaatttgaagctccctagcactgtattgactcatgttcttgaagcctcttgagtttaatacacagactaattattacatacatgtaaaatagggatgaaaggaagaaaatgtggatatgtacaaaccaaaaaaatttgataactaaagcaatattatttaattgcctagttctagcatgcgatgatcttctatgagagatatttaaaaacgtcttaatattagaaatttaagtttgacttgccagatgtggtggcacatgcctttaatcccagcacttgggaagcagagacaggaggatctctgtgagttcgaggccagtctggtctccacagcgagtgccaggacagccagggctacacagagaaaacccggtcttgaaaaaccaaaaccaaaaccaaaaccaaaaaaaaaaaaaaaaaagttgcactttgtaaacataacttaaaaaaaaaaaatcagctgtccaggtccccaccacaaagcattaatccaaataagttaatgatttagcaacaggtctgttgtgtttagagagcgttcaaggtcattgttaatatcagggacatgaccacttaaacatttgtactacaggctttttttttttttttttttttggctttggctttggctttggctttggctttggctgtgttttctaagagcaggaaaggtagtggaagggattggattcttaggatgctctgccttgacttgggatgacagacccgtaagagacattcattttaagtcaaaccaagagtcaaagctctctatgaaaaccgggctaatgagcaagggcttttatttgcctctttctctgtttacctgtcagtcatgcctggaacacttgtgagtccttgctttgtgttggagagacgggaagagcttgcctccagccgtgttggaagcatagagagttttctgctggttagaggctcagaatcagcatctgtttaggtcaagtgttgtagaggaaatttgtcaggcggtaatttcttaggcggtgaacacccaggaggttagttcataaccgcactctgaagaatggatcatgtcctaggcttgctcctcagcagtggaaaaaataaaaagacaataagaagagcttagcatctctccgagatatcttcttcaaagcaggggttataataggcatctttattttagttatttaaaatatttgtgtgtgtgctcctgcatgcacgcattgcattggaggccagtcatgaccctcaagtgtgctgtccaccttgtctctggaacctggggcaattaaatagtactgctttagttttcaaattgttttgtagtttgtacatactcagattttctttctggctgactttgaactcaggtcctgatgcttgtgtgacaggagctatttctccagccgtattctaagaaattctaaagaaataccaacagcctcgtgtaattggaaatctatgtaacaaaatgcatgttaatgtcagacccatctggttattcctacaaaatcttttttccccattttcttactagcagaggacttacatttgtgggtggtcaggataaagaacacattccctccactccctttccctccccccaccctccctctactcctcttttccaccacagactatgtttcagaggaagaggatgccctttgaggaaggtttagcgcctcactctgaaaaggtgtttgcagcatgagcgtgggaagaaagcatcttgggccacagagatgaggccactgtagctgccctgcagacgttaccaaggctccaagaaaggaacctgctctccagatggccttaagtctgcctctgctgttttcacctaagaaaaggtggcacatagtgggtggtcaagggccagagtgcgtttcctagatcatctgtagacggatttgtaagcaggagagggaaacagttgctttagaacagtcagggtttgctctagaatagttgggtttggtctagtggctgagaaggaggacaggagaagagagagagagagagagagagagagagagagagagagtctgaaccaagcttcttgccacagaggcactgaagggacacagcctttgctctgtttcactttagatctaggaaaaacttgggaatttggacacccaccactgctgctgaggctctggtaccctgaaaactaaacatacagatttgagtgaggtttttatttgctcacatctagataaaagtgtcatcagttctcacttgactccatgttttccgtgttctgtgctattgcgctcactcaggtagaatgtctgattttcttttcagttgcatgaacatcctccacaggatgttccccatgcattccccactgcctggtcagtttccgttcttacctgcctgcctgtcatctgctcctcattcaaatgtcagcggtgacttgtttctgatctccagactgtgtgaggacagtgtattgcagtggtggttttaattttcattgtttttttgtttttccttttctggtgtggtgtatgaatgtatacatgttcgtgtgtgtgtgtgtgtgtgtgtgtgtgtgtgtgtgatgtgtgtgtgtgatnnnnnnnnnnnnnnnnnnnnnnnnnnnnnnnnnnnnnnnnnnnnnnnnnnnnnnnnnnnnnnnnnnnnnnnnnnnnnnnnnnnnnnnnnnnnnnnnnnnnnnnnnnnnnnnnnnnnnnnnnnnnnnnnnnnnnnnnnnnnnnnnnnnnnnnnnnnnnnnnnnnnnnnnnnnnnnnnnnnnnnnnnnnnnnnnnnnnnnnnnnnnnnnnnnnnnnnnnnnnnnnnnnnnnnnnnnnnnnnnnnnnnnnnnnnnnnnnnnnnnnnnnnnnnnnnnnnnnnnnnnnnnnnnnnnnnnnnnnnnnnnnnnnnnntgtgtgtgtgtgtgtgtggtgtgtgtgtgtgtgtgtgtgtgtgtgtgtgtgtgtgtgtgtgtgtttcctttgcgttgaggccagaggtagatgtcaagtgtatttcctaagtatctttccctcttggtttttgagactgagtcagtctctcactgcgtctggagcttggtgattggctgctagaccagctgcccattgaattccaggcatcctcctgcctcttccacctcctcagtgctgggattaccgtccccagtttgctggccacctggatttttatatggcttccaaatattgaagctcaggtcctcatgcttgcatggcaagcactctccctgctgagccgtcttcctagcccttgattctatttctgtgagtattgggttgtcctttttctccttttagatttaaacaaaagggcggagtctacattaggtttgtttgtagttaccttgccggggtcttgccaagcatccatcggatagaacacatccaagaaatacattgtatcaatgccctgtgctgtagcagatgatctggacttcttctgccttagacaagtctggtttcaaattgtgcctctacttacttttctcacagtgtgatcctcagatgttatttaaccctgacacctagattttccttatctgtaaaatgggatgctagtcctgtaaggaggtcagtatctcaccttactaaggggttcagctatgatcaacacttgtaaaacaggcctatagcaccaggcacctgagcagtgaaataagtgcacgctgtcttttagtctttgtaagatcatttgcaggaatccctctgcagcggctgacctgagctcacactccaggggtgctggaagtagtgccatattgtgagctgatgtttgcttagctgttcaaagtcacgctgccttatcaattgtttgttttggttttgatcttttttttttttcttccttatgctgccagtgtacatttctaaattgccagtgcttgggtttatctttctgttctggtttgatgcatattatcctctgatgtactggaaagcacctggatgtatgagtgtgaataataacttcgcttatggtgtgtacacggtcatatgctcacttctccaccctgtatttcctatggctagaactttcaagttttgttacattttaacgctaaggatttttgcttgctaatattttccccctaccagaatatagtaacaaaaggaaacattttaaatgtattgctttatccttttattgtgtgtctaggtgtgtgggcatagcacgtgtgtagaggtcagatgacaacttggtggattcatttttctctttctacctctgtgtgggttttaggcttgaactttggcaggcagactttcacaacaagtgcttttactcactgagccatctggctggctcctgttttgttttatttattgagacaaaatgcacttgtttgcagccattacgttaaaaaaatcaccccccccaccctcccggtatctctgagctttcagcttggccaagaattgggaattctgatcaaacttctgctactgttagggatgagcaaaagcatttatttatataagataattagccagtttacaaacatatttatttaggaaaaagtgggtcaagttttaaatagcaactaatcaaattataatatttcccttggaaacacttgtgaatatcaaacaaaatttgagaggattttactcctgtctcttagagctacccaaccagcaaatgtcactcaggctttggcagtggttggggaaatgctttaaaggggccagaggatgtagctagtctgtgtggagtatttactgagtgtgcacaaaggcctggggttgatccccatgcaagatgcaaaccaggtgtggtgcctgtttgtggtcccactcaggaggctcaagcaggaggatcagaagttcaaggtcatgctttcaccgagtctcaaatagcccagggtatgtagggagtttgaggccagcctgagctacttgagacccggtaagagcattttgtaaaatcttgctcgaaaacttctctgtgagcagctttccattggctcacgtctcacatttcttatgggcctctgaagcagaagggctgctggtaggcgcgcccaagattaactggtggtaagattgggtttgaaaactgccacactctcaggcatggcaaaggatgaatatatctgaagacgctaattttattagtcacatatgatttggggcacaagaataagaaaatcccagtcaaatttcctggcttgacatctgtttgtccactctggaatctcctgacctggagactgcaggcaggtggactggcccccagtggaccaagcaactgcaagtccgctcacatcattatgctagtctcactcccacccaccaggagagggagtgcctcagacccacctggacccactgggagacccatcagagtactggactgaaaggattttgtggtgagagtaacagtaagtgtgcatccaaactcagggcccctggccactgtaccgcaggtgttagcctcattccagtcaggtactctgtctatggccacctgggggtgctggtagcttcctccttcctcctcttctttctcccagaagtgatgagtgcctgaagccctagaatcagtacatacacggtacagtcacaaagcgaccgatgctgcagtggcttaggcagagttgaaatttttttagctgacattgaggctggaggatgagcttcgggggcaacaaacgggatgtggtcagcaccagagtgggagaagagctcttctccatcctacagtcagggctggtggcaggaaggcgggactctggggttgagcaagctgtggtaacctcacacccactgtggccagtgccttagcccccagccctcagaaggctgagttctctaggtccttaggaaactctgcagccaccaattactcagttctcagagttctctttcaggtcactgcccctgggctctgttttagacctgctttaggggcggtctcctgatggggagtggtccgatactgacttctcagcccctgggaagcctcagtcttcagagctctgctttgtctccagccagtgaagaaaggttttcagggactctgctggagggtgcagagggaacccagtggtttgctgtggtcagtgatgttgacacctcactgttaaagtggaaagagttcgagaaacagcgtttttctaaaagcttattgttcatgcagcatttaattctctctcatttgtgtgtgtgtgctcgagtgtgtgtgtgtgttctagtgtgtgtgtgtgtatgtgcatgtgtgtgtgtatgtgcttacctgtgctatgaaacatggactggtcactttgcctatgtctttcttccctttctttgcagctcatcatagtaacggaaagctcttccctgcctgtctaaaatctaaattccacgagtgtggcagtgtgtgctgtcccatggccagccccttggcagaagcctaagtgttgacagaaaccttgcctaagttttctttagcagatttggaacttaaaaaaaactatctattttttttttgaggatttcatacacgggtgctatattgacataatttttacctttccctctccctactcccatgtccctctcaaggtcatgacctcttcttttttaattagtcttggaactttgagacagtgaccggaagcttctgcaggaaacgctctgtgtcccctcacttgaggttgcattccctgaatttctgggtgcctagatttagacacagtgtgattttctttttggtgttctctgattcctgggctttgaagacacagctgggccagtttatgttttggtttagtatttatttattttactttatttttaacaaccagtgaagtttaaggctgtacccatttcctctctttatttcttgctttaaatgggggaaataaagaagacctgagtgttgccccatgtgctgtgattgtagtgtagtttgaaaataaccacctaaaacaagctatttagttttgtagctagaggctggagaggtggctcagcggttaagagctcaggctgtttttgtagagcacctaggttcattttccagctcccacacggcagctcgcagccacctgtaactccagtctaggtatccattgccttcttctggcctcctggcacatacgtgttacataaacatatatgcaggcaagcaatcatacacctaaaataaaaataagtaaaattttaatttttagagagccaattatttctgctttccaaatatatccccgtatcaataaacacaatgtaaaatcaaggacttaagggctgaagagatgtctcagcaggggctgggcagtggtggcacaggcacaccttttttccagcactggggaggcagaggcaggcagatgtctgtgagtttgaggtcagtctggtctacagagggagttccaggacaactggggctgttgcacagagaaaccatgtctcaaaaagctaaaaaaataaagtgcttgttgtgctcgttactcttgtagaggacctgggtttgttggttcctccttatgccaggcagctcacaactgtctttaactccagttccaggggatctcatgcccctctggcctccacaggactgcaggctcatggtgcacattccaagcagacaaagactcacatctgtataaaaacccatttagaaaattaacaagacaaagtgctgggtggccaggtatacttaaaataaagcaggtaagtgagggcatgtgatgtcactaacttaactttgaagggtggaacactaggagagaagacacgggtctctcataactgttactctctggctgatccagaagaaaactagtaaaggacagggacttctgttggtgacactgagtccagagtgagcttggacaccatggccccttcacaggccttcctcagacaggagcagaggaaggattcgaaggagtcttatccttcatgctaatctctgtgcctcctggagggagaggccaccagcttccacggttgtggcctttcagtgacaatgtccttagtgtgcaatttacagacccacggttgaaggcttgtctgtctcctactgtgtgtattttctcatctaatttataatgatggatgacattgatggatggcatggtgacttaatgctcaaagctaaaacagcgtaaatgaggaaggctggaagttttggtttagcagagaggttgactcttgtgaatctgcttgttcctggtaagtgcctgtgagatgtggtgactgtggaaggctgtcccttttttaattagaattttggtgggaaatcttcacaacgataaggccaatgaaccttaaaagcagcatttaaattaaaatctaaaaaatccattgaagggaaaggaatgcgaggggttggggagatggctcagtggtaaagcgcctactgtgcgggcgtgaggacccttgttagagctgggcatggcaagagtctgtaagcttagcgttgatgtgagtggatgttgcagatggagacgggcagatcccagggctggatggcagctagtctaacctaatctgtgaacttcagctccagtgagagagcctgtctcaaaaacacagtggggcgcgttggaggaagacatgggggcttccacacttgcaggcacaggccatatgcatgtgtaatcctaccccaccttcaggaaatatgaaagccagataaagtgatacacacatataatatttagttatggagcacaaatggtctcaagggatggcgatttctcctcacatccacagggagtagaagattattctatcttggagagaattaggaaaaccctactgtgctgtgggctggtagtcctgggttctgtaagaaagcaagatcctgagcaagccatggggagcagggcagaaggcagcactcctccatgacctctgcatcagctcctgcctccaggagtctgtacgcactcgtgtgcaagtgtgtgtgtgtgtgtgtgtgtgtgtgtgtgtgtgtgtgtgtgcttgtccttacttccttcagtgaggatcagtgatgtggaaatgtaaggtaaacaaaccctttcctctccaggtggctttggtcatggtgttttcatcacaacaatgatgaccctaaaactaagacacttaccaaattcaaatactgctgttcctaggaagacagactccccgtaaagaagagtgaaggtctggtgcttgcatgtatcagtgagttaactggtaagattgaaagtcgttactctgtaccttagattcctggaacttcactttcaggtggtggaagcatcagttggctctgaaagtgaatttgccttcaggagcttcgaagtaggaggcccccaggaagggccttagaatctgtgtttccccgaggctgttttgaaaagaagggaaagtggcgcttcctgttttctttcttaaccagaggaatctgtttggtgtcagcacagaaggaaagtactttatagatgaaaggagcaagtgtggccgagacagctgctccctacagggataggacagttgtggctcttaggcccgagggacaacggtgcttcccttcaccttgtcttcctaaaactctcgttctcagatgtgaaattctaaaagtgaggtatacaacttccaaaaagcctttatcatggccagtcctgggccctctagagttctcaactctttccttgctccacgttgtctcttaagttgtgttaaattacaacgtgaagctggatttggcagtgcagcctgtaatcccagcccttgggaggcggaggcaggaggatcaggagttcaaggtcagcctagcctgagctgcataagacctgtcttaactcccctccccacataaacaaacaaaaaagaaatacatatgtttgcatctaaaactaagaaatgcatatgttcatatatattatgtggggtatggaggctttgaaatagagagagaagaaaagcacacatagtctatctacagatggttgcagtgagcttcagaccacaaagatcttctaggaagataatggtgtagctcctcctttccttcatctttagacacgcatgtgtgctcgggaggggttctgctttgtcctctctgtcctctcccccgaagggctgatattggagacactcttccacgtatgaagggttaaggacagccagctctgagttgttagttttattttcagaggaaaaacccaatgaaagtagccagttctgtgatgtgttgtaacagagcagtgttgcagtgttttgcctgtggaatggaggaggcccctctttgcccttcaccgaggtcaaaagattagatttgtgttaagaattgcaaaacttcaaaaaaaaaaattcaagccttattgacctcaaggtatgctcatgctcatgaccatgggtggacccagaagtcgggacagggcttggctcataagcaatacttgagataatttttgttttgtttttttgagacagtgtctgatgtaagtatgggagctcagattgtcataggttggcctcattatggatgttggccttgaactcctgatcaccctgccttcacctcctggggcaggcggcccatcctgctaggcttggctttaggaatggtttaatgcctttgattcttcccacgtcaatcggaggtgcgtctttgggatgacagcttctttttgatcacctgtgtttacatttagctattggaaaatgctggaagcttggtgtctgcgtgagtcacacgagggtgggaagtgtcttgcttctcagctcgtccctttctggcagttcctaggcgcaccctggtcttggactgactcagaaaaaacactcagctgctttagctttaacgaggtagcttccacccatccagctttctggaaatgcacagcttcttgagctgtaatcatgactgtgggaatcactctgcagttgtcagaggtttttctggccagggaacttctcttgccaactttttcctctaagaatatctcccttttatgtctgctcagtcaggaagagatacctgcatctcatgttcttcgctgttttgaagaaggcagcgtggttaagggaacgggaggggtaggtgcttagctccagacctagtcaccaaccacagtgctctgaagattttataggatggaaagttcctggttacttaacacttggccctgttctgtcctggcactcttcctggctgggtgattttggaggtccccttatgtcgtctctgtgtacaatatatgatgtcaaacatatggttttcccaggggtgagtcagtgtgaatctctatatcgttggtcccttgttttaacctttcttcctgtggtgtcatcaaccccatttcatcttctgcgttttgttttctttgcctttgtgagccactgaactatcggttcctaaactcagacttctgctgtcccgaggcagtgagaggtttggtgcaataaggtagcagcttgaagagcaccacagccagacagcagtgtgcatctcaggtgtggttgggtcatctgttaagttttatgtatttatagagacttatgcattacaatgttttataagccaagtcattctaatgtaagttacatatgggaattggtgttcaacaaggcaataaaatgtgtaaaataatttcagtaaacagtatttcatacccagtctgacaacagtgaggtttttcagaacctatacacttgtcttagattaagtttataggtttgcatatgtgctggctagttttatgttaccattggagaggaggaagcctcaactgagaaaaagcctctgtaagattgggttgtaggcaagcctgtagggaaatgtcaggaactcgtcggattgggtggtaggcggttaggctttgctcccttttgacacaatccaacatcccattgctaagaaagcaccatctaaagaccacacaggcgtttgtgtgcctggcagctcgtgtcaaccgtggcagtagctagcatgagggaagtgcacagatttgtatatataatcaatatacatggattgtatctctacatatgcaccgtactgcttgaccacctcctcccccatgggaatctgatctcagagaagaaaacatctgatggcctaagaagcagattcttttggtgattaaatgaccaggaaccaaagtttcatgctgtttgggtttctagtcaaagtgaatgcgatctcgatgcattggggagattctggttaataccggaatgaaaaaggatgacaaggacagctaccaccgggacacctccttttgggaggattatcatgtgtgtatctaactcacacaccctcatagtatttatggcagcactgccggccagaccccctgtagctctgcctgtgcgaggtcaggtcctgaatctgagtgagatttcccccgtgagaagaaggtgcacagtctttccctcttagaattgtcctagaaacattcgttaaaatgttccataggttcaaagtgtaattttgtaactcacgaaggaagtttttatttgtttggtgttttgagatagtgtttccctgtgtagatttggagcctgtcctggatctagctcttgtagaccaggctggtctcgaactcatagagatccgcctgcctctgcctccctagtgcctggattaaaggcgtgtgccaccaccgcccagccaggaagggatttattaacttaggtggctctctcgaatgcctgctgtgcgccaggctcctttctgaagcagagcaagcattagtgactgaaactgacaatgtgtctctaagggtttagaacgtgtcagaagtggtggctgaaggtggtcaatcctctgatcactgccaccaggtagggagtctcaccttttacagagtcacataaaaaaaaaatgagagggaaataaaagctgacactaacctgactgcttttattttttcttttggagacagggtctcattatgtagctctggctgtactggaattccctatgtagaccaggctggcctcaaactcacagagatccacctgcctctgcctccgagtgctgggattaaaggtgtgcgctatacacctggcccctgaccactcagtattttgctgtgtctcactgaaaaattttcattttatgtgtacgtgtgtactccagagtgtgtacactgtgcatgtgtgtgcaggagccggagtgtgccagaagaagcgtcaaatcagacataactggaactggagtcccagttgtgagccaccatgagggagctggggaccaaatctgggttctcttcaagagcagtcagagctttcagccactgggccatctcttcagccctcggtttctattgtgcatatctagaggtgtgtgtacgtgtactattaaattacttattctctggcaatttcagacacaaatacagatgtcacctcttcatcctcctattacccacagagtcgattagtcctgcccactaattgtgcaagagtgtggggccatctactccagcctgggcagactgctggggccacacctctgaggaaaagtgactctggtctctcagctgctatcacctgctaaaagctcttcagttaagggtggggccttgtgagcccctcccttctccatacttggaggaataatggctgacttgatctcaggcgagttattttaatatatgcatatatgtatacatacgtgctggcgaaaacatgcaggcgcacacgcgcgcacacacacacacacaagcttgctgattggtccatgcttatttttacaacatcctataggtcagggcatttcacttgcagggctttagatagctcagctgctgttggtggctgtcaaggtcaaagctgatctaacaggtttcctaccacttaatgcttcctgttcttcccacaaccagatcttttcatgaatctaggactctcaaagtttctgagtattccaactgtaaatatttacccgatgtccttgtgcagagtgaggtttctgagtgtgatgacgctaacagtgtaaacattctttccctctaggttggtggatgaccgctgtgtggtacacccagaggcaggggatcttaccaacccccccaagaagttcagaggtaagaaaagaattgagaaggagtgacttaagagggtagattattttttgtcgttaggtaaataatgttaaatggtactgagtgtgtcattcccagttcccccacagggttttgttgttgttgaactttgggggatcgctgatcaacaattatctgagttttgttttgcaatgtcacttttacacactgataagaaaccttggcggccgggcgttggtggttcatgcactcgggaggcagaggcaggcagatctctgtgagttcgaggccagcctggtctccagagcgagtgccaggataggctccaaagctacacagagaaaccctggctgaaaaaaccaaaaaaaaaaaaaaaaaaagaaaaagaaaagaaaaagaaaaaagaaagaaagacacctttaatcctaggcatgaaagatggcttttcaagccattcagtaagaactaaaggctacccatttacagatttctgtggcagtcatattacaaaagttatgatattttactggcagcttgttaattgtcttcatgaaagtcctgtgctgcatgaatgtggctttcagagtcacaccttgaggctttgtggtaactaactgttgtcatagagcttcgttccaagtgaactcttagaagtctcttcatggtctccttggctgagaaaccagttgcagcagcctgttgtttagaactcagctgctgcaaaaggattaatgggatctgcagaacattctagaaaacagaaactagtcattaaaaacatcataacaacatgcaaacattaaaagctataagagagaacttgtgatactgatctttctgagctggagtgcctcacttaatacatgtgttagttaggtttcctctttttctccctccctccttccctctttctttctttctttctttctttctttctttctttctttctttctttctttttctctctctctcctccctcccctttctctccttttctttctctctctctctctctccctcccccttccttccttccttccttccttccttccttttcaagacaaggtttctctgggtaaccaccctggctattctggcactcactctgtagaccaggctggctttgcaccaccacctgccaggctttggggagaaagggtcatattagctcacaactcttggttacactcaatcactgaaggattcagggctgggattcgaaacagaagctgatgctgaggccatggagaggtgctgcttgctccccgtggcttgctcaacctgcttttttatacaacccaggcccagctgcccaggactagcgctgctcacagtgggctggcccctcccacatcaactactaataaagataatgctcctttacaggccagtctgatggagacattttttttctcaattgtggttctctcttcccagataactgtagcttgtgtcaagtttacaaaaaacaaaacaaaaacaatgcccccaaacccaaccaggagaatataataatgtctagatccacccatttccctacaagtttcataatttcatttttgtttacaactgagtaaaattccacggtgtatatatgccgaatctcatcatccgttcatctgttgatgggtacccagactgttccatttatcagctattgtgaacacaccagcaataaacatggatgtgtacatttctctgttgtagctatagagtcctctgaacataaaatcgggagtggacagctgcacctcatggtagctttatttttattttagaaatccccatattgatttcctaatggctatacaagtttatcctcctcccagcagagaacaaggattcctctttccccaattttctcttttacaaaacttactttgttgtgtgaatgcatgcacatatgtgctcctgagtgtgccagtatgtgtcacatgtgtgctgtgcccacagagaccagaagaggtgttagatctgtggttacaggtggttctgagctgccccatgtgggtgctgggaattgaaccgagtcctttgcaagaaccgtaaatgcttttaaccactgagccatctccctagccttgccattttatttgttcttttttttttttgatcatagccattttgactcctatgagatagaatcttaaagtttccatttgcattttccttgcattggccaagtatgtcgaacgtaaaatgtttatttgtataatgatagtttgtgtttctttttttgggaactatttatttcaccagtccatttattgatggtaagttttgtttcattctctgttgtggtgatagattacttattatttactaaagcttgcatgaagattcagaaagcaaagtcagccacaagctatagagatcagatagtggggatacacacctttaatcccagcagccagaagctaggaggtggtggtacacacctttaatcctaggagtcaggattaagaggtagttgatctttgtgagtccaaggccacccagatctacacaagagtgatcccagtcctaaagagaaacagctcacaagaagatgatctcagcacctgggatcacacacctttaatcccatcactagaggggtataaaagatgggagcagggtcttcagtagtcagtatcaggcagtcattctccagccacactgaggataggaagatactgaagtcttaggattctctagccacgccgaggagaggttacagtctgcggtttggtggagccaggattgcatttcagtctgaggtagagtaagagctagtggctggctgctttgcttttctgatcttcagcttgaagtttgaaccctaatatcaatctctgggacttttactttttgtgctatactctgtgtgattgaatcttagggttactattactgtgatgaaacaccatgaccaaaagcaagctggggaagaagtttattttgcttacacttccacaaggtagttcattgttgaaggaagctagaacaggaactcaaacagggcaggaacctggaggcaggagctgatgcagaggccatgaagggagttgcttactggctcagcctgattttttatggaacacaggaccaccagcccagggatggcatcacccacaatgggctggtccctcctctatcaatcactaataccctacaggcttgcctacagccccatcttatggaagcattttcttccccccccccacctttttcaaaatttaaattagaaacaagcttgttttacatgtcaatcccagttccctccccctcccctcctcccctgccccccactaacccccatcccatcccttttctgctccccagggagggtgaggccttccataggagatcttcaaagtctgtcatataatttggagcaggacctaggccctcccccgtgtgtctaggctgagagagtgttcctctatttggagaggactctcaaagtccattcctgtactagggataaatactgatccactaccagagatcccatagattaaccagaccttcaaactgccatcctcgttcagggggtttggaacagtcccatgctggtttcccagctatcagtctggggttcatgaacaaccccttgttcaggtcagctgtttctgtgggtttctccagtctggtcttgacccctatgctcatcactcctccctctctgcaactggattccagggtttcagctcaatagttagctgtgggtgtctgcttctgggtcctctgtgatgatcctagcttgtatcaagttgacataaaactagccagcacacagttgtttatatatgctaacttccctgtctggggtatggctggtacagagtgtgcttcattctgcccattcattctgacgatggatgtctttgctgttcgaaactttaacttttcatagttccatttttccgaccttacaccgtctcatgatggttcaaagagaatagtctaaaaggcaaactgggacaaggcagtgtttgtaatagggagaggcatggatgtcagggtttaaccgcactgtctgagagctgtgtcatctaaagtgggtcacctgtcaggggcctctgagggcatctgtcactgtcccttgagagttgagctgaatagcaagaacaatgctcattgctcagggtttgcaggctcttcagtcttcccagggacagccattgcagatgaagttacattatacaaatgtataataaaaaggcataatgcatttccatcaagtgtgtttggctctatccctttacaccctaccctcttctggggcagagttttctttcattttatttttgtttctcagtcattgaattttacccatagaagatcctccccccccccaaaaaaaaacaacccagccattggatgctgtgggctgagacatccaagctctctctgggatcgtgtgatcaaacttggttcccaggggtgtcccaggtctcctgctgtgagtctcagcagccggattcccagggggattttgtgcccctcagcaggttgtgtgccagtgcagcttattctgttgaatgggaaaggttgaagctaacagctctgtgcccaagaagcaaacagattcagatgcctgggcccctgttacccagtgggcagggcttcaatgtgtcaatcaccctgagctggagcctggttttcctgtaatcagactctcggctcctctccctgctggttggcagtcagttcctgctcccactttaaagccaatctgtctctccagttttcatcagagaagggtgtccattttttccccccaaacccctgctgcatttggtcaccttgtctcattcattgtctcagggttgcaatgcttcggtgtttattgactttgcccttgatatttttggagattacagccaggcatcttattgactttcttttggcttggctctttgtgctgttttggttacagttcacttagctgggggttaaagtctggagacttacagtacagaggttatgtgtacgtctctgtatcacacaggccataatgtcaacatgatttattactagtcttgttttttgatgtataatttcacatttattgtgttaaatggagacatttactttcatttatgttatgttgactttacatttttttcttgcctatttcccttttgtatttctcccttttctggaaaaccctcctgtagaatggagttgtacaaaagtctgtgtgtgccagtgtatggtccttttcagtcaggagaagctggcttccatcagaataagaggtttacatgtctttctgtgtccctgtgggggaggaaacatagacatgatggtgaagccaaggaacctgtccccaggagggccaagtagagagaagagggttgggtttttggactagaatgttccaactcttcagattctgcaattgttgacccatgcctgtttcataacccaccaagtctgtcacagggccactcatggcaagcaacagatgtttagagatcatatgtcatggttcttcaggagctggaattcaaaggatggatttctgctctgtgcagtgaaaatagcaggtagcaaagaagaaggggcgtgggtgtgaccaaggaaaaaattttaacctgtttccttttctggtgactacaaagggtgttttgaaggcatggcctcacctttgcctccagtcatggaggttacacactcaggcacacgaatgaagacttattagtgtgtgcattcgtgctcacgcgtatatgcaagctgtgtgtgtgcatgtgtgcatgcttgtgtgcctgtgtgtgtgtgtgtgtgtgtgtgtgcatgtgtgcatgcttgtgtgcctgtgtgtgtatgtgtgtgtgtgtgtatgtgtgtgtgcatgcttgtgtgcctgtgtgtgtatgtgtgtgtgtgtgtatgtgtgtgtgcatgcttgtgtgcctgtgtgtgtatgtgtgtatgtatgtatgtgattatcagagagcccagcatgttgagttcagggcctgtctttttctttttgtacacaaagacaaacggtttcaagtttgaaatcagctaatgtaatcgattggacatttatttgatacttccatgcagcatcctgcttcgggctcccgagtcttctttattttgtcgttagagattgttgctatccagatttggggttccaaaatctgagggtaatgaggtcacacagcataaggtcactgacctttgaagcagggctgagaccagagccatggttcacatccctcccgatctttgaactttgtgttgttcttttaagttaaagacgcgtgctagatggaacaccaacacgagatacattaaccgtggagtttattacaggggggccggggaggggagcggcagggggtgaaaagagagatgatggaagagagagcaagagagagcaagagcagagagaacagtaagagagtgagagagtaggagagtaggaaagcgtaagtgggtggagtctgtctttaaaggggtcctttacacctgcgtgcagacttagtactcatggaaccctgggctgaccagagcactgcctgagtgcattctgccaggtgacaggggcagccagcataatgcctgagtccttacacgttgcttgcctggagattctgcctcgtgttcacagctgcccgagggagtcggaacctcttcctcacatcaagggtctgtttcaagggatttcctgcagctcctgtcttctgtggtcttgatatgttttaattctttttacatgccatcaactatcagtttctcagggattttctggccatcatatggtcttgttagttttctactgaggtccctgttggttagtttgacacttaacaagcaccaaggactaaacatagtacagttgactttattctggggagaagtgtagatggaagtttctgtcccacccagtccccaggccgtttagtcccaagtaaacacacagaggcttatattaattataaactgtttggcttatggttcagacttcttattggataggtctctcttaattattagcccatttccattaatctatgtatctttacatggccttggcttactagtgaagcctggtgctcttgctcccgtggcagctacatggcatctcactggtgactcactctctctcttctccttcccagaattctcctggtctggtagccctgcctatacttcctgcctggatatatcctgcctgtccattgtccaaaacagctttagtcatctacaaataagagaaacatatattcacagcacacagagggacttcccccatcagagaagccatcttggtcgtggagactacactgtagctcaagggactttctccctttgcttttccagtgaacccgaactgtgatgtaatgatttgttgctcagactgacagctgcctggatctgtattaggaccttcagcgttcttcacggggtgtcactttgactgtagatactgagcatttgcggaagtcaccctaataactgctgtctatagctaatcctctgtcactaaactcccagttggggtaataatgagtctattttccttaatgagttcactttcttcagtgatacttcagagaagagctgaagggtgaggagaagtacattccggcgcctgtttgaatctcccatggagctactcagagttacagagatcatgcattttaaaatgctggagagatggccccatggtgagagcactggccactcccagcacccacgtgacttctcacaaacagctgtaactccagtcctagggcatccaatgcccttccctgaccctgggtatcaggcacataggtggtgcacagacatgcatgaatgaggggaaaacacccataaacataaagtaaaataaatctaaagcatgcagtgttcagtaaaaggagattcttgtggttttgagtgataaggaaagggcatgaattgttgaaaaccttgcaatgagttatatgtctaagaaatgaatattgcatgaactttgattagtttgtagatttatttttgaagtttaatcgctcccctatgagtaacaagtgaggggctaacaaggtggatccgtgagtaaaggtacttgttgaacaggcttacaaccttcgtttggtccctgggatccataaaaatctggacatgtccgggcgttggtggcgcacgcctttaatcccagcacttgggaggcagaggcaggtggatctctgtgagttcaaggccagcctcagggtctacaaagtgagttctagtaccaccagggctacacagacaaagcctgtctcaaaaatcaaataaaatcaaaacaatttgtatatgctggatcacgcttgcaatccaccactcttaagaggggtgagaggcaagacaggagaactgcctggaagcatgaaggctgcttgcctggagcatactattgcagaagtgggaggtgctgccttgttaagactgacagcaagaaccagctcctgaaagttgccctctgacctccacaggtatgctgtggagtgcacaactacacgccataaagccatatcatgcacacttttacaactgacaataagtaaaaaaaaacaaactcgtgttgtaagttcgtgggtcacggtctcccttcaaactacacgggaagctattggtctaaattcctactggataaatatcatgatctgagaattttaacagctagcacggcaagtagataaaactgtgacagagagttctgggggctgctcagcagcttaaggacacttgtagaagacctgagtttggttcccagcacccacatgggaggctcacaactgcctgtaactccagctccagaggatctgacacactcttttggcctccatgaaccacccaaatgtgcataattaaaaacaaacccttttcttttttaaagatttattttgtgtatatgagtattgcctgcatgtatgtgtaccctgtgtgtatgagtatcacgcatgtgcagaggctggaagagggtgttgcatctcttggaactggagttacaggtggttgtgagtcactcaaggtaggttctaggaactgattctggatcctctgtaggaggagccagtgctctgagatggcgcccaactccaaaacaagtctttaaaaaaaggtgttacatgtggaaattctcagctttgagttcttaaaatggtcttttgtgtgtgtgccatctcacgtgatctagtattatcctatttttaccaaggtgcaggccatactttaagatgggaagtccatgctacggccgtgcagtcagttaaaagtagactgtcaacagagatcattgctacactccagacaaaccggagataaacatagttctcgaggagtttataatctaacgagggagataagaggtgtatacaaataattattagtcaaggtagaaatcgataagggctaaataaaaagctacaatgatagaggtattgtgggagatttgaaattcctgctctaagtgcagcccatgcttcttaattaggttgcatttttcttggaaggattgtccctgagggagggacacctgggatttcaggccaacaattcgacttttcatgaatgtcattaagaaactattattgctgcctacctcagaggacggctctcaggagtgtgttctctgctggctacagttactgtgtagtggtgatgactggtgtgtatggcagcgtccggatgcctccttgaactgtgatgttatccaccagccctgctgttctcttgagtgaccagagatggaagcaccaggctgtcatcactggagatatggttgggtagaggcgggggaattaaggagttcaccagacccaagataaagatgaataggtgtttttttaaagaacaacttacgcaggtaagagaaaataatggcccggtggttcctgctccaaaagatgcagtctctgttccccgagagactaaagagagtgagcaccccccttctctatcttctgcacctgaaaccacgcccaaaagggtgtggtcgctactgcaactttcactggcaaggcaagatgccactatagtcaggaacaggtgattgtaagtgattcaacaattgatgatgattaaaaaaaggctcatcagcaacaaatatttgtcaagtccttactgtatgctgattgctttatatcattaaattatttaatcctacccaatgagccttattttaatacattcttattatctgttgtttacagaaatccaaaagcctcccctttcaaaacaaccccaaaactgttccaacggctttccctggagagacaacagcgcatgtgttactctctccagaaagggaacccacagcagataaaagtaacagttgcacccgtgagtttttaattggggtgaaaggttgcttctaaggagtagggataactcaaaagcagcaacatctcaggaaagccgattctagcataggtgaccattaggagcattgtttaatcgcttttataatgttggtacaggccctaaagaatcttccaggctctaactctcttcaggtacccggacttcagtttagtcatgtttactacctgggactcctggagcaaatgtttcaatttggagagaatgttgcgatttggagaaacaggcccgatgacaccaatgacttatataggtcaaaggtttatttatctttcctttaacagttgctaggtgactgatctgggacaaattaaattaaacattttgcatagccactctaaacataccatactataagcatatttaaagagatttgttttggggctggagatattgctcagtggttaaggacacaggatgctcttccagaggacccgggttagattctgagcacccacaagcagctcagaactgtctgtaactccagtgcagggaaaccatcttctcctggtctctgagggtgccaggtgctcacatggcacacagacatatatgtgggcaacacacccattcgtaaaaataataagataattaaaaaatttaaagatttctggtgtgtgtgtgtgtctgtgagagagagagagagagagagagagagagagcacagtgtctgtggaggcccagaaaagggtgttgaagcctccggagctgtagcaacaagttgttgtgagccactcaagtgctgggaactgaacccggattttctgcaagaacagcaagtggtttttttttttttgttttgttttgttttctgagacagggtttctctgtgtagctttggagcctgtcctggcactcgctctggagacgaggctggcctcgaactcacagagatccacctgtctctgcctcctgagattaaaggtgtgcgccaccaacgcccggcatacagcaagtgtttttaacagctgagccatctctccacgacaggcaggcatattgtgaaatgttgaattggctcagttcttacattcttagcatgcataaaagtatgtccagtgtgtgtgtgtgtgggggggtgttacatacctgtttattgtcattttaaatttagattagttttgagcctttcatacatgtatattatatttacattttttcaaccttctctcttcctgcttcaacttctattgtgtccccactcgcaaattcatgacctctctttctttaaaattgctgcacaccccttctccctcatatgttgatcctctgagtgtcacttgggattgcagaacctaccagggatttatactagagaaagggattctccctttctctgcagccattaattgcctgtagctctttttctaggagtgggctttgagatatttccttcatccatgttgattttgtgagcatttcagctcggatggaattccttggcagccaggagccaaggaataccacaaagtcacgctgcacagcaaacctaacgagacagggtttctctgtgtagctttggagcctgttctggaacatgttctgtagaccaggctggcctcgaactcacagagctcctcctgcctcagtctcccggttgctgggattaaaggcgtgcaccaccacgtaattgatttagtgggagggaaaaagccaggagggtgactgcttctgctcgggcaagaaacagcagcaaactgatcaggatgcagggcttatgtacagtttcttgggaaggggtgaacttttcagggtggagctttccttgtggagagtgatgggatttcatgtccagacattcggtttttaactctgtagggcaggggcagggtccagaagttagggcacttagagtgttctgtgggtgggacctggcagttagaggccttgggggaggggcttacagacatatcattcggagttgtcattatgctggtctcttttagcaacatattgctgggagttcaggggggcatcttccctgctgtgtctagatggtgttatctagcagcaggtactctggttcttgggctgttgtaatctttctgccttttgctgcttttcctggacttaggtgtagtggttgctttgcagatacatcagtcggattaggttggtcacttctctgctgtttgagcagttgtggttttctgtgatgatctttgtcttctacaaaagaggcttccttgacgagaggtgagagctgcacttaactgggagtttaaggataagagttcagaatacagttagcaattacatggtggtagtgggttttcctctggggtgtgggatctctccactcattggtagttggctaggtttagagtaccagacatgagttatttcttgttgaataggactaaagtcaagtttgacaggtgttggttacccccaagataacaatgccactatggcacccctggggagatcttaccaggacagtcacaagcgtggtttgtaggctctacagctaggtaggattattgatccttttttcctccctcggcagcttgcacagctccttctgataccatgagagctagtcctcaaggaggaggcttccgagtcagttcagtttcattctcccaagtttggtgttggaagtatatggtgtcttcagtcatagggcctgcccttcaaccagggacaatgacaatagcctgtgctgtttggggagactcttggacaaagcactattttaagtggaaatacgcacagactaggctggtcctgaggtaggtgtaccttgggtctccccctcctgagtattaaaaagactaaaagtcctgtttcatgtgtgaagtccaggtatctccctgaaatagcacaatctttactgttcttttgagttagtaagacattctaggtgagagattgatttctgactcgtgtattccagatcccagtcgactgccttcctccttaggtgttgactcagtgacccagtggtttcaaggtcctctgatcaggcgctcttgtttatagtctgtggttttcatggcaaatacagcaatttcagaagaaagcaaacagtgctggcgggtggtgatgtttgttttgcaaacgcttggaagcggtttggaagccgtcttccaaagaagaaggtgcataataacctcacaaagcctctctctctcttcagccgctgaaatccagtctcagctggctgcgcaccacccgaggtggttacacttttgcttgcagagagcagtgcaacactagaacactggaagaagataagccgacctggggagtgtcctgtcctagaatcacagtgttagacccctggaaaactcaggtatccggggtcccaggccacgactgcggtcaccccaatcaccaggtggatttgagagcttgctgcaaactgcatgaggctttattgtaatttaacgagctaaccccatgttagctcgggtctttcacccatacgccgtgggcggatggctagaaaagacagctcatagggcctcccaagagatcttatagggcagcgtaaggggagtgtctaggggtaagcacaggctcaggattggtgtgcctccaggcctggagggcttgccctgtgttgattggcccataactggttgttatggcccataggccctcccagggtggttgctatgctttgtgcgtcattgctgtgcgcttgtccgtaaagcacacccagagccataaagcatagctccaccagctaaattctgaggggttccttgtcacgagacaggcatctgactttctagtgactaactaacttctgattggttccttgtcacaaggcaggcatctgacctctaagtgaccaaggcaagtttatggcaagcacgtgttcggctgttatggctgctgaaaggggagctggtcccttcaacagatgggctgaagatggtgttttagggtagcatttgagtcattgtgtagttgtactgctttttgtagggagtccttcatgaagtctgggacagccttctgctccaaagaagtttcctgttaagcaatttgaactctgattgtatctgcataatgaaatgcccagatgtgggaaaattttggaagagacatagttgaagagagttggttttgtggctaggttctgaagtgtggttgtagacaaagaacatccaaatccttcaaaaggcacactgaaaaaacaaacaaagccagctgttatggctgtccccgtgtggacaccacactggggctgatattttggtgtaaaacattagcaaaaaggattttagtatctattgttactgtatttttgtgtatgtgactgtatatagtgtgggcatatgtgtgtattcctaggtatgttaattggtgtgtatgcaactctgtgggagtgtgtacaatggggtgtcacagccagagggcaacactgagtatcttcctccttcacactccaccttatattaaaaataatttaaatgtgttccgtggcacatgtgtggaggtcagaggacaactctgtgaagttgtttttctcccttatctgtgtatggcttctggggctctaactcgggttatcaggcttgcatcttagggcggccagcaccttcacctgaacctggagcttgctattcagcttggctgaccagtgagccccagggatcctcctgtctctgccctctcagccttgggattttaagtgtgtgccttttgctgtgcctagctttctattctttattttttctttctattctttttttttaagtgctgagaatctgttcttaatgcttgtaaggtaatgttttagctagctgaaccatcacttaactcctaattcctattcccaattacagtttctcccagtattaagaaagttaaagatgcaaccaagtgatggtggcacagggctataatcccagcggatctctgagtttgaggccagcctggtctccagagcgagtgcaaggataggctccaaagctacacagagaaaccctgtcttgaaaaaccaagaaaaaaaaaagataaaataaagttaaaggcgtgtaggtacctgaaccaatagagaaagtagtttcctactttcacccttacatggaggatgggcagctgtgcctaccgggctttccctgatggcctctctttgcctttctcagtaagtctgttaaaaagcccaggttccaaggagcctagaaatgctgtctttgctaaccaaagttttggtacattgtcaggtttttgcttaaattagaaataaaggagtgcaagatgagacatgagtctaagagacattgtaaccagtttattatatcatggagagcgagtgagagagaaatagaagagagaagaggcggagagagaagagaagcaaagagaacagagggaagagagcctacgtgggcagggtctgtctcttaaaggggtcctctacacctgtgtgcagacttagtttccatggaaccctgggctgaccagggcactgcctgagtggatcctgccaggtaataggggcaggccagtataatgcctgaacctttcaaagtagaaagtggagaaaacactggcaacccagagaatttactgcatatgccctgtgtatttgctggtgtagtgtactgcagccaggcagcaggccatgacctgaactaggtgacaggaagaggtgtggactgggtacccctgtggcttctctgggtcttttgagaggaggctatacaagatccaactatactcataacaactctaacgtgttattggctttcttgagttttgttctttcctgttcatacagtatcttcgggagctacatgacatggctttgtctggtggttgaaacttcaataccctcttcatggaggagaggaaggcaggggatgtaggcactttggtgggggggggggatccgtgattctcagggggcatgatcagggatggagtccgtacagcactcctctggattctggtttagttttaattcccgtcctctctgacagagttagatttttcttgggtaatgaaatttcatccagatgactaaaggcagttatagtcacccgaccccctgttctgtcccctgagggaattcggtagaagcctctcgctgtgcttaggagaaggagtaggggagaaccaaggcaaggggaaggctggagactgcagtctgctacgcctgcttcagctgggcacatcacagcaccacatctgggggtgtcattatctgagtcctgacacacttcctgaagtgctgagcctggctttagtttatctgtatcccttatgtgaaactaagttctaggttctcttggttgctacattgtttgccttctttactcagacttggcttggatttattgaaagtgattggcagtaggttacacaccttgctctgcccaaagctactctttcagtgttcaccacctttagtcagtctttgtaggaatgctgtctgtcacctgctagcttgtgggcaggtaccagcgcacagtgtcagtctgtgtttcatttgtctaaatttgcctgttgtttgtgaaaccacttttaattttcttaggcaagatacaattttacaatcgaaattgaatccgacctcagtatttaaatagcagctgtggagggaaggccaacagttacaaatggctctttgccttcctttgaaagggagcctttctgtggggaaatgccttgcctggccaccctgggctaatttacatggaaaaagggaaacacaggattcatttgaatttggtgcataaattatatccttgccagacaaatgtgaagggacaaatttcagcatttctcagacaggacattcttaccacaagttagttaatataatgaatatggcccagtcaccgccatctggtcagaagtggatatttttttggttgtttttttttttttttttctgtagcatttaccgatttacttgagactcactttgatagacactgggttagtcagaggtagatggccttcctgttgtaaatcagcaggagaatccacattggtctggacctcaatcctggagaagaccctgccagtttgtattctttaccgaggcttcaccggggcaacataaactctctgaaagactatttaagctttacaattatgttcctgttgccaccaagtagaaaataagagcaaatgcgtggttttatgctgcgctcatgcctgtgctgtaaggtttgtttcttttgggatctcagttctgcacagcatcctcttgtgactaaggaatgatttgttccttttccatgaggagcagctccctgttttgctagggttgacttgactctgagctctgcatcctgggggagaatctacctctaagtctcaaggttcagcattactccctgactcatccttcacattgccatggtgcttccttacagtgacatctttcagacacccggagactttccagatatgtttgaggcccggagagtttcacaggtgttgttagcaaggacatttgactctattgatttgcatggctttataggtcaagagaacagggaaccattttttttcaggttgctgcaggcctcttacaggacaggaaatgctaattttatttgatcctaggagaacatagaaatgcctttgctagttcaggtacccagctctagctagggagccgggaccactgaggaatgcctgtgcaggctgctgcaggtgaaatgacctcggaggaaactaccaggcctgctactctgtcctgcctgggcgcctccctccttccatccctccctccctccccctctccctctccctctcctccttcccctccctgtgtcatcctccctttcttcttctcttctccttttttttcttcctctgtagaccagcctggtcttgaactcacagagccacctgcttcagcctcacaagttcttatagtatcaattcctattaaactcttaacatgttcagtgtctggtgaaggcagaaagaagacgagcagggggtgatgggatatgagaaagtgtggcagagctgggaagagaccaatcagagaacaaggcaggatccaggcgagggagcagctgcaggacaaggagcctggagagaggagcgcacgctgggtttttaatttgggcacttttcttttaaatcatattttagctaacatcactatccctgggattacaatgaatagaagcaaatactcctagccctctcagaactgcctttgagcttccagtctgccttagccgggagagtctgagctgccagccatccactctggctttcacgtctcccgtgttcccagaggttgttctcatgaggtctctgcctaaaacattgtcacagcaccaggtgcctctgataaattttatcagataggcagaggaagagtaacagttgtgctaagcacacatgttccggattcaaagacttatgtgcctccaagagagtcagctaagcattccccaaactgacacggcacagctgagatgactcaggctcaagctttgtggcagcattattaatttctagggtgcttaaaattaagacaagttttaaaattaatttattttttgagatagggtctcaaaaaatgtttttttctggttgtcctggagctttctatgaagactaagccatactcaaatgcacagagactcacctgcctctgcctccccagtgctgggattaaagtgttcactaccacacctggcctaggagattttagatgcctactatgaaattttaaaatgctaaaaaaatttaaattagatttacttatttggtgcatgtgcttgcacacgcctgacacatgcgtggacgtcagagatcaatttatggcagtcacactctcccaccatgtggggtccatgacttgaactcaggtcctcaggctttgtagccagtgtttttacccactgaactatctccacagtttctaattgtttcccttgaaggagtctggggcaacccactggggatcctctgtgttgccacgagccgttattccactctttgataaaaccttgctttccttcgctgcaaaagaacctgcttacccatatagtgtgctattactaccacaaatgcacagaccttcagctagacacacagctctgtaattgtgagggagtctgcatgtgcttgggataattttatgtctgggttttggacatttgaaacttctggtatgaggtgatgtgcttgacatttcaaggctggttggcctgagccgatggaagtttattatgaaaacatggggaagggaaggaagacagaagccagctttggtcacactgcctgggcctcatggctacagcactgtgtgtgagtagcgagaccggtcctgtggatgccacagcaaccattaaaactgctcccgcagagatgactcgccactgctttgaactctgagacacagtcatctttccacctatttgagttgatgtcctatcacaaaaaagcgagtgttaactttccgtgcgggaggcatgaccaaatatctattcgggccagatggtgcaccaaagatagacaaagaaatgatcccacccaagcccagcacagttcaccgatgagttcagcaggtttgctgttgggagcatggctgacccccaaacatctgcaccaccaccaagtccccctctggcatgtgtggtgagttctgcaaggctgcatctgcattgactcccccccctccccccgtagttacccttccagctgccagcacctcccaacatcacatacagcagaggctgaggtatacacagtgagggtgcagcagggagcgctgggtctcagctgcgggtgcagtgcacttcctcatccattccaggagggaacatccacaatcctcagggatggggttcttgtaggtcatcatggcagctgtgactaagatggcgaaggctgccctccttagatgatggcacgccacacacagccagccacgcgattgtgttctgcacaggttccaataataccgaactgtacacatttgcatcatacacaaaagaattaaggatagagaagtaaacatagcataaatactttttttttctagtattttctttgatagtcccccagaatgcgcacctttttgagagccttctgtcacagtgtttgctgtcattatgactcaactgtttttgctgcttgggtgatgtcagctggctgcgtgatcatgggcagatagcctcatttaactcacttctaaagtgaggtaattatgtgtgttttgtagaactgctttggagattgaactcaacaagatgtttaaagctcttagggtaatggctggcctgctggctgtcccccctcaggtgtgaactgctttctgttctcctcaacctccctcctgctcatgtaaggtgtctactttctgctcttctgccccggggcttggcttactgccctgtttctgccggctgtcttctgagctctcttgtgtagacagagcatccagttaagtttattggttgtgtctgtctatcccatttccctggaacaatcctgacttggaccgtggtcgcagtgcagttggcatagctctttcatgttgtcaaggatgtagttttggaaacaaaggttatccttcgtaagaccaccatgggcccgtgtgagaaggtggactccttgtgtgacgactctctccctccttggcactgcatgcctagagcaaccgtctgcagatgacacagtgacaagtgacgtattgactgcaggaaatgatgggacgatagggtcggcgagcatggctcagagggatttccagctctgccatccagggacacagagcccacactttagatgaggcctgggcagttggatcctataaccagggtgactgtctatacagatgcaagagtgaaaggcaagaatgtttcaaacattgaaacatgtttagcttggaaatctaagtctctgacctgaagctcaaattcatgatcaattttttcctgattcgagaaaatcttctcctaattcgggagcgctgacacaccagaccctacccagtgttgacagcagtagttagaaataggtcttgccaaatggggaacctgcctaagaccgaactagatttcctttatataggtgacaatgttgcgaatgggacaatatatgaggccactggcagagggtccaagatctaacactaatgcacagactgacttaggtgagcccattctatatggagagatgccttgcccagcctagacacaggggtgtggggggtggagaggtgccttggtcctgcctcaatgagatgatgggacagacttagtagacttcctaggggaggcctcactctctccatggagcaggtgggaggaggggggagtgcagggcttgagaggaaaggagggagggggaactgggattggaatgtaaaaaattaattaaaaaatgaacaaaaaatagactaagattaaaaggtagaaagtagaaaaaaaaaaaaagaaataggtcttgctctgtaagaggctggagagcagtggttctcaaccttcctaatgctgtgaccctccaatccagttcttcatgttgcagtgacccccaaccgtcaaatcattttcattgccactttgtagctgtaactttgctattgttaggaatcatagtgtaatattttcttttggagatagaagtttgccaaagaggttgtgacccacagtttgagaacaactgtgtgtgtgagtgtgtgtgtgtgtgtgtgtgtgtgtgtgtgtgtgtgtgagagagagagagagagagagagagagagagagagagagagagagacagagagagacagagagagacagagacagagacagagacagagagagacaggaatcatttcttattctcatggtgtctcacctaagtctattgttcttcacgtggtgaattttctgtttttctccacttttcatccctttggacaccaagtcgatactgaatagcggatgtaaagatcccgtgacagtgctggggaaattccatgtgattcatgagttatgacatcatgctgaggcagataacttaaaattactcttttctttatgaagtcgtagaagacaaggctgtaattaaaaatagagcattaatgcttttgatattttcctcaaaatgcttatcatgacgtgtgcatgatccatgtgggcacacgcatgccagttgactctctccttcccgtgctgcttctggggatcaggctctcgctgcaaactccttttccccctgcacccttccttatacattaattttaattaacactcaacatgatgactctcattatgacagtcttatggatgaatatcatattctggttatattcagctcctcgcatgtttattttgtcttttgagatggtctcacagtgtagcaggctgacctcaaactaagggtcctccttcatcagccgtttgagtgctggggttatagcgtgtgccactagactggcaggtgtttggttttagtactactttcaggacattagccagaattgttaccattgagaaaaagaaaaaagcccacccaaacaattagatgttagtcctagcattattattattattattattattattattattattattattttgaggtttattattattttgaggtagcaagactttaatttcgaatgtgaatgtactgtttggttgtgctgttcatgcctgcaacactcttaactcagggaaagcaagagttcctgtgttctcaagattcaggagcagatctaaggctgtgcttgtagctcagtggtagagtgcttgcccaacactcaaaaggtcctgggttcagttcccagcactgcaggaaaagaatgaggaccaggggagagatgctctataattaatgtcttggtgtccctttgcttgctcagaaggaaacacagcaattggaactcattagaggagtttgacggtctcgactgaaaagccaccaagtttggcttctcagcagcacctggcattgtccgtcatggaatgagcaggggctttcccctagtctctaaggtctagagctttgtgggtaataatctgagtgactgtggctttggaccactgtccattttcagctctcacttgagcatttaaagtcagtgctaaccaatggtaagtccactttgtgtagctcccctgtggatttcaccgccacactgcagtgcaaacatttaatagagggtctaggagctggctcagggggtagagtgcttgctgtgtgagtgtgagggcccgagttcaatccctcgggcatggtgtgtgcatgcgattctgttgaaatggagacaggtgatcctgtggagactgacgaccagctgaattggcaaaccccaggacagtgtctcgaaaccaaagtgtataatgattgtgacaccccaggttggcccccacatgcctgcacacacatgcatccgcacacgcatagacggtttcaacggtgtcttggctggtggactccgaggtttgcctgagtttttcatttgttccatcatatatgtttcatggtccccaggaactcaaaagccaaataagcttcttggtctccccagcattgtgtcactgctgaggagtgtgggctcctgggaggaagcttgttcagatactaggggtggtcatggcatctgtaagtgtgaaagcagggtctgtctcacgtgagaaatgggacacccagtggacagttctgcagacagctggggagccacaatcctgaggctttcctgacaagctgggtgagaggcaccttcctgaagtttaggtgggaatgactgtcacccagagaggtaattcctgtgtagtcatttccgaagattaagaacacttgctctggctggaaggacctgtattggtagaaggttagtaggcctgctgaagacccgtggaaggagtgagtcatgttgagagagcctgttgaagaataataactaaaaaaaaaagttaatgaaagattagtatgagggaggatacccaacacgggtcactcaacaaaaggcaaaggggggtgagttagaatcggatgcaagaggaaatattaaagccagtgttggaagagatgggcccggtggtggtagagcgggattggagtgggatggtgtgagaggtggaggtgagttaagcagagactttacttgtcctgtgacagttagcaaacagagaatggagcctaaagacaaaacaagggacctccatggacctgagtagaatttatagcatttgcatgcacattgtgaaggcacaaagatgatgagggttgactccatcaggttactaatatttctgaagtctaggagtgtggtagattatggcttttttttttttcattgagaccttgttggaatggattaactactttggaaaaatgataatctctctagtgaggaacctggaacatcaggggtcacagtcatagcaggtcacacaaagtcttaggggctcatggcacatacagagctctgggctggcagcagtgtgatatgttattaagagcaaggagacacggaggaagaggaagaggaggaggagggagggttgaggggtaggagagaagagaagagtaataagaacagtggggaaggaagcgagcaggcaagtctaacgaattactttcctttctaattttaagtgcctgcttctgtgtataaccgagagcttcagataaaacaaagtgtccttgtgtggtgcttaagattgtccctcagaccgcttggccctagctgctgattgctgctttgatttacctgggtatttagcaaggtgtgtttctgggagtttgaaagggaagctgggggtgtcttttgcttactacgatactcattttcatgtaaccactcagagaattagagcaaaattaattaggaagctaaacaaaataatgttccccaacacacacacacacaaatccacacacacacacacacacacacacacacacacacacatgcaagcttgagctcttggagagaaggcaaatttatacagcaatgcacaattttgccacacccagttttgggtcactttgtggacaccgagtttctctcatgtatgtgcatttaactgaggagcataaattagctgtgaatgaccccagtgtggtaagtgaccaagcgtgggggtctgccaagccaagtctgtgaatctcttggcaagctagggacaacacaactggctgggtgataccacccacagacaagaaccctcaggagttgtcaggactgtttccacagaggcacctactatgccatgacccagagcaatgcagggagcagtttccagcttccaggaggcaaattaccagggtggtcttcgcttatttcttgtgcaaaggcacaggggcttcctgggccccaaggagaacactgctgctctctgaaagtgggattcagggagagaatgtgctcgtttgaatgcacagtgcaagcaggctgcagagaaacggctctgggagccatggcagagcatcccctgcttgggtgcactgtgcgtatgtgtgtgtgcgtgtgtaatgtatgcatacaagtatgcgtgtgtgcaaaatgtgtattgtgcacagtgtgtgtttgcatgcatgtacactctgtttgtgtgtgtgcacagtaggtgtgcatatgtatgtgcacagtatgtttgtcagtgtgtatgcatatagtgtatgtgctgtgggaaccttgcattttgagcttttttaatccacttggagtcccctgtttagattctttggggttaatcagaaatttaatgtgctgtttatgaatttggggtgcacatcatctagttagggagttaagagtcaacgtagaaaataaagaccaacaggatggtttgtatctgtagatggatagtatatatgacaggggaccaagaaagggattcctgtgtggtcatgtagtcagggaagcctcctggaagagtagaaattaggtttgtgaaataagttctttctcattctctgtctctgtctctctctctcccaactttctggagacagtgtctcacgccgtatctcaggctgactttgaactcactgtgtaatgcaggctggactcaaatgcatgaccatcctcttgcctcagcttcccaagggctgggatcacaggtgtgtgtcatcatggccagctggagttaaactttaatggaaatgtcagttattgaacatttgcggtctttgtgtctagaaactggattcagatttgggttgagtgagacctctgggaagctgtggacactctctgttaattgtgttcctgggaaacagtccacccaccctttctttttctctctgaaatgacatgttcttgtgtgtacacggatgtacaggtgctcaagtctgtttgtgcacatgtagagaccagagccagatatgggatgcctttctctaactcctcattatttccttgagacaagctctctccccaaccggaaattcccgctgcctcagcttggttagcagcccagcaagctctctggatgctgctttctcactgcccatgccggttacaggcttgtgcagccatgaccagctttcatgtgggggtggggtttgaactcaggtcttcatgagtgcacatcaggcgactcactttcccagatccccaaatgaattgttctaaaattttgctttttttttttttttccagtttgatccccctatagacttctgtaattgaggaattggtgcttccaggatggcgccaaagagcccttcttcaaacaatggaagtcagcccccttgctagcaatttttctaacaagctgactgttggatttgcagtttagaaaatgaatctgtagcttctactagattatcagccccaggattcagataaacaaactttccagctcaaggtggggcggctttcctcttctgtctggaatcagtcacacagaaggggaacgtggcatctaaccattaggggccccgactctcagctgagcagctactgctccaggagatcacacctgctctctgcctgtgtttgttcagggataaaaggagagaagcccaggggctcctgtgttttcatccagcagcctagggcctgcggtttctcattctccacgaatgagcctgctggtgcaggcaaagctgttgctaaccactgggcaggataggcctccgtgacctggagaacacacacactgctcctgcctggggtgtttctccattgaaaagccatttcatatgaagaaagttacacctattgctgctggcatagcttaaggttaaacttaattaattagtgtgtgtgtgtgtgtgtgtgtgtgtgtgtgtgtgatatgcattcctcagcatttgtgtggaagtcagagggtaagtttcaggagatcaaactcaggttgtgaggcttggtgacaagcctgttacccactgagccatctcactggcccagttggcctaacttttaacttgtgatgatctataaataagtaattgcctgtagaatcattttcttctgtatttcccatttttgtctgttgtatttttacctttttttttttttgagacatgttctcgtgtagactaggttagctttaaactcactgtgtagctgaggctggccttgaactcttgaccctcctgcctttgccttccatgtgccagaattacaggagtgtaatgccaggcctagccacattttttctttgcaaagctcctaacagccaccttaaaacggcaaggcagtcaccatcaacaacaacaaagatcatttctcttgggagaatcaggcgttgttattgtcacacagaacagtgtccagttctgtgagctgctgccatccagcacatggccaggattttcatcttggttcatctgtggcctctgtctcttacgcctcattcaaaatggacaaaacccctataggttttcccttttaaaatgtacatagtgctttctgcccagatctctggcgtggctctaggtctgcccagtgattctgatctccggcgtggctctgtgaccagtgcctcctctcttgtgtaatcctcccaacatatccttgtcttgactgtcctctctctgcagtcagtggaatgagcatgctaggacagaagttggggtacactatcaatgtctccatctcgctgtgagtgacatccagtgtccccattggcccccatgaccctgtgtaaactggctgggcctctgctttgtggcctctctgccatgatctggccactcaggggcccaccagttatgcctgtctacttctgttactgtcactcaccctcttcaggggccttcggggtctgttcacctctttggtgctccaagatgtcagcagcctctgttcaaatnnnnnnnnnnnnnnnttggtttttttacctccctccttcctccccccctccctccctccctccctccctccctccctctctctctccctccttctctctctctttcctgcctcagctgggattaaaggcatgcaccatcgtgatgagcttgagtgtccatgaacaactgaacgaaagattgaaagtattcacttgtgaatacaggatgaaatgtcacaggctccagttcaatttaaaggctttatcgtagatatgtattatatttgatcataatcagggtgtagagaatatgctcgtagtatctggtgccacaactggattctactcaagatttgtctaaaataaatggaaacaagaaaacacagtgctaatgtatgcaggcttggtttggtgggtgtacgcttataaccccagcatggaggaggtagagacaggatccccgtgagtttgaggccagactggtctacagtttacacacacacacgcacgcacgcacgcacgcacgcacgcatgcacacacacacacacacacacacacacacacacacacactacaatagaatgagaatgctgtgaaccaaaatttctttaatgataattcagtgagggccagggagatgactcagtggataaattacatgagacacaaagggagagagacctgagttcagatccccagagcccaggtaaaaagtcaggctgctgtgacagccaactttaactgtcagttcaacacagcctgaagtcgcctgtaaaggaatctcaatccccatcaggttggcctgtgggcatatctgcagggttttcctgattattgatggatgtaagaagacccagtccactgtgggtggctccattccctggacaggcggccctgggctctataaggaagccagttaagcatcatttcttcatagtttctggactgtaacctgtgggctaaaataaacccttttcctccctaggttgcttttggtgatggtgtttgtctcaaccagagaaaggaaccaagaacaccaggtgttccaggctgttctccccccaaattaaatggtggctccagcttcaaatttgtttcatgctgtgtttaggaaagtttatctcaggaaacttagccagatttacctgctgcgcccagggagtgtcttatcagccagccatcaaatactttggaaagctacactgtacagggagatctctagatcctgccaggcagcaggcaactgccccagtgttcccagcctgcttaccaggcaaccacaaacaaaacaggcagaggaaagctgcgtggctttgaaagcgtggtttctgtcttaggagcgtttgagaagcagctgatccatagagagcaggcactccagggtcaggtacagctatggccattaaaaaattaaaacagcaaacaaaccagtaatttatttactattcactcattttaagtgtttactccaaggaatgttggtaaattcagtgagcagtgagcaccgcagctgctcttccatcaaagggttcctccttccatccatgtgccattaccttcccgaacgtacagaacagctggacgcagtctttgcatcatctcctgctcacaaggacacagctggtgaggctgcctgtttgggttcgagtcttagcagtgccactttctggctctgggttaggctctaatctttaaacagggtctcatgatctgcaaaatgacagcagcgttgacgtctgctaaagaaatttccatgggttaaataatctatcgagtgtttatccgtgaaccatgtagaagctgctgggtgttggggaggcgcagtcttgaccgttcctcccaccctccaaagctgtcattcgttttaattttaaccattctgatgtgctttcagtcacatttccctaaaggccacgggtactggatatctcaaagtttcttattacatttctctctctctctctctctctctctctctctctctctctctgtgtgtgtgtgtgtgtgtgtgtgtgtgtgtgtatgtgtgctaaaagggaatatatatgcacagcatgtgtgtggcggtcaagacagcttgtgagagttggttctccctttctgccaagcgggcccaggccatgaggcctgaggcaagtgcctttacctgacaagccatccccaagcagcagcttttttgatatttgtttttattatttttaattatttataggtgtgtgtgtgtctgcatgtgggtgtgtgcatgtgagtccagacaccgttggaggccagaggtgttggaggccatggagctggtgttacagatggttgtgagccacctgatgtacatgctgggaactgaacttggttatctcttcgtctcttctggatgttttaaaatcatttacacatgttttaaacatcgtttaaaatgcttcttgccttcccttattttatgagtgtggtgcacggtctcatggcaccctgctttagaaaccccaggacacaaacacaactgtatttgttcatctgcaaggcaagttgggctaataataatgagtagtgacattgcccgaactgtgagtgttttaacctcataccaacacacactcagtggtagaaaacgcaggagactccagggctgggccttcctggttccagaatgttggcaagtcaaagcaaactgcagtttagtgaccacaacagagacaggcgagtggtggggactctgtgggtgcaggggcgagccctgtcctcttcgtgccaacctcctgaaaaccaggaagtgttcagacctcttcccgacacagatcccttctgctcgttgcttgtcccagcttgaggaataagtttgcctgcctgtgagtaattcacagtttcggctttgtcccccagttgttggcaaggttccctgatgctgaactaagctttgctttgatcctggatcaatcactatagggaaataaatcgcccctccctgctttagactggcagctgctcatttctgtgaaatgtgtttatatacctttccattttctagaatgcaacattttcaagtttttactgaagttccccagctaccacggctgttgtgcttgtgttacgatgcctgcagccccaggtacaagctcctttgttaggaagtcacttaaagtgtgactcctacagtggtggtccttttccttctgtgagggaccattcattcatcgaccagccccaaattgtggccccggcttttcagcaactccactactgtgtctatgaggtattagggtgattgcatatgtgtaattcaaactagatcacttgagaaaggaacgggggatgatttactatcaggcccaggcagctggaataagtcagtaatttcttaagcttgtccatggagtcttgggtatacagggctatataatcactgtatcaattttctgttgttctgacaaaatacctcaggctgcaaacttataaaaaaggggggcttatttagctcccactatttgaggtctaaggacatggtacagcctggctgtgttgaggactccgtttactacatcatgtgatgacgatgagagattttatagcgagacgggcagtagagggtagggggttccacaagagcgaccttcatctccttttgaggaagcatccccaatgacctaattgccttccactaaactccaccccttgaaggtgtcaccacctgtgagcctggccaagttccccacaagagtgctaggaccctagatgagccacgtccaagcacagagtcactctgattatgttacatttgtattttaagaactagtgatttgtacccgtcctctgtgccccctgtgttgtacctgagtgcttgggttttgtttccttactgtggtttttatgtttttgtaaagcttgactgttggtgaaagtacaaggaagtctagatttttatgtgtcagaaaacttgatgagcaactattctgcatatttctgtcatcatgggtggtctaaagggtgcctctctgggatcctcattcccaaccctcttcacttcctgggtgccaggctttggaggtaaaacaagaacagagattgtcaactagttctactgttgtgctctaaaatgtcacagaagagcaaggacgaacttctgatgactgctccttcggaagcttcgtggcagccttctgtttgcaaaaaggttctgactgcctgcacattgcaggcaggtgctaaacacagactcatacgcagacttgctgacgagtgaaggtagctggtggacactgctgtaggaaaggacaggcagaacgagcagaggaggaggaggcatttaaaggtttatttttatctttatgcatatgaagtgtgcatgtatgtgtgtgtgtaccatgcgtgtacagtgcccacagaggtcagaagagggcatcgagtcttctagaactggaggcacagatggttgtgagctgttctgtaggtgttgggacctgaacctagtcctctgcaagagcagcaatcactcataaccactgagcaatcgctccagtcccactgaacactattgcgactttcagaagtaaatgtgttttgtattgtaaccctgcgcaatgcatgtgtgtacacatgtgtgtaaccctgcgaaatgcatgtgtgtacacgttacagtacatggatgcatttctcaagagtggtgcagtggtgctcctgctcccctttccctgttcttcctgctccatttggttccactcagtcggatcttttccatcccattcagaggggatattaggatggaatggattgtttgattttgccatagacgatacatgcacacatacgcacacacacacataccacaccacacacacacacacacacaccacataccacataccacacaccacacacacacacacacacacaccacacacacaccacaccacacacacacatacacaccacacacacaccacacacaccacacaccacacacacaccacacaccacacaccacacacacacagtacacacacacacacaccacacaccacacacacaccacacacaccacacaccacacacacacacacacatcatacacaccaaacacacacagtacacacacacacacacacacacacacacacacaccacacaattatataagtatcacgtatggatgcatgcatataaattgtttcctttcttctcttttggctcttgggtttgtttaatgaaatttagagatgtgcatttgattcctgaaatcaattcatccattacacatttttttataaatcaccattgtgaacatgtcatatctatagtgggaaagctaagtgaaaaacattattcattgtgttttttcccccaatttcaaatgctgcttatccattgaaatggtctattgaatgttagaatccaaaccttaaccagaatataaattattcataatctatttctcttcttatccaaatgaagctttgtttctaagtatttactcattaacatttgaaccaggaaattaatctcaagaagaatacgattttgtaacattctcattgatgtatttacccttattttagtacattaacaaaatccccctaaaaacattcatcagtttcttttgatgtatgatatctattgaacatacgtgtgtataaatgtgaacatattccacagtttttatctagaagttatctgtgtgcacggctttagtaggatggatgagaagcgagccatcccttgctgtctggccagtatttttccactgtttatacttgctggtcacattaaggctttgctgttaattgaacagtcacatctattgtggtgacactaggacctggatctttctgtgatgatgaaggaaagtttaagtgcagaattccgaaggactctgtttggggacacgaggtttgtggtggaagctggtttcaactggttctgagtgacctcaagatgcacatgtagagttaagaacaacgtttgacgtgaggcactttgcttcaacatgaaaaaaacgtgtgtgagtaattgctttgactcatagctgcatagtgaattgggcttggaggccctggttcaaattccagatcaactccttagcccctttgtgggtttaagaactgcgttttcatttctgtaaccctgactgactctcaagagggaagagaaaacgctgtttgttgccagtttgtagcactttttactgtttacacagtgtttgctgatagtcaactgtgttgagggaacaaatgtgacaggaatgtctttactgtcaaggtcagtgctgtagtttggatctggaatgccacccccacaaacccggacccatgtatggaaagcttggtccccagactgtggctctactgtgaggtagagaagactccatggtggggcctagccaaaaagttaggtgctggtcttctatggaagggcggcttcccgccctccccgcccttctctttgcttgctttctgtgaggtaagtggttccctccatcacattgttgccaccatgatttactgtggcaccacaggtccaaaggcagcaggacctgtacttatcattaacttaattatctcaggtattctgtcacggtaatggaacggaaagttacctgatacaagcagtcatttgccagggcactctaggtactgtgtgtggttgctcttgtccatacgtgtaatgtgttctaatctggagagtcttatcaggaagaaccttgacaactcaggctctgaggttttgctcctttatctcagagaacagaaggctggattttatctgagtcccctttgaggcttaacactttagcattgcacagcccggagctatggaagacggtttctcttcccttccgcagtaagggctctgtgatggaggaaggagattgctgttttcatgggtgctggcctaagatgtgttgtgatgaacttttcgtgtttcttaatgcaggccgaccattcctcctgacctttgcagcctccttaggcaggtccaagggagagatttggtttgatatttccaaaagaacatactctctctgataacttctcaacattgagagtctgatacagacagtgcattttaaaacgagttccttagactgaagtaaaagccaagttacatacagctctgttgcagaccatcccacgaccagctcagactaccccacggccaggtcagagatgagtcgctgctgtggactggccacttgtcttcctgcctgcttcccaaggaagtgctctaacaacttcattcctcatgggcaaggccactggactcggctgtgtccccttccaaagaggagagcattcccagaaccttaccttacacaccttcctccccaagcagggagtgaaatctctggcagcaacgttccctagttggcatgaggtcattctacaaggtggacgtccgacttgctgaaagacaggcttgctgatgggttaatgcgttctactgcacttaagtcttaagacacctctaaggaggacgcatgaggaagcctgccttccctacacctttggcaagatgcactgagaattacacactggccttgactagagtgctgaaggtggtttctgggggacagaaacagcctcaggggcaaatattttaggggtacgaagcaaagcacttcaaacttgagtcagtggctacaggaagtggaggtgttggttgttttcccgctggatttcttcgtgtgtgtgtgtgtgtgtgtgtgtgttgggggggggcggggggggggttccttggtgttatcccgtgtggagtttctgctatacaccattaagaggtttcaagggtcatccctccacacacatttgaaatgaggctgaagcaagtacctctggtacttccttccaaagctcagccttggctctgcaatcctgtaatacagttccgtgtgttctggtgatcccccgcccccttcataaaattagtttcattgctccctcatagctgtgatttgctactgttaggaaccataatagaaacacctggtgcacagggtatctgatgtgaccccctccccaaaaggggtcacgcccacagattgagaaccgctgttccaaggccattagagaagaggtcctgatgttgagcggtggttttctggacactgcctgatgaacatgtgccttgctggataactgacataccccaatacaccatgttcctgcagattattggcctcctcggcgaaggataagcttgtaaaagaattaaactcaaatcacttccttttatttgtgcttttcatgattattctatgatacaaacttttttcctcttttttaaaaaaatttaattcattgagccttgagatgatgatgaggtggctgtctagttaaaaattggctctgaactaatttctgtactagtttcaagttgagagaatgaacagatgcaggaatttgaggagctaactttagttttgtttttttaatttttttttattttttaagttgtttttttttttttttagttcaaattaggaacaagcttgcttcacatgtcaatcccttctcctcccccaacccccacctgccccccaccccatccaccctccactccccaggcagggtagggctcctcgatggggctccccaaagtccaccacatcaaccttggctggtcctaggccctcccccatgtgtccaggcggagagtgcatcccttcacgtgggctgggctctcaaagtcccttcttacaccagggaaaaatactgatccactaccaggggccccctagagtgcagaggcctcctcgttgacatccatgttcaggggtctggatcagtcctgtgctggcctctcagacagcagtctggggtccatgtgctcccccttgttcaggccagctgtttctgtgggtttcacaagcctggtaccgacccctttgatcttcattcctccctctctgcaacaagttccagagttcagttcagtgtgtatctgtggatgtttgggtctcacactgtagcctcagactcatggcagtcctctacgtgagtgcttgcattataggtgtgttgccctcaggtctctggagagctaactttaacagcaggtttggaaaggtctggataggtttgggtgagtctgaattaggtgaattctgtgaacaagaagaagagggcctgtctgaggcgccaccctcgctggtactgtgacagaacctgcgtgtttgacttacaaggcagcagcaagggtttcctctgttcaatgctgctgcgttccagagccttcaagaattttatacaagctcacgcagggccgtcttccactgaaagggtggacacgttgttaattgcacactcttggggtgtgttccggctgaacttaagattgctggttttttgtggcttgctgagggcttagtcacccctctgtcttcatggggctctgactgagaaagaggcaacatcactcatactgcctcacacttatgacaggccttaaagctcacagagagattccacctagattatctttttgtctatctcagcacccctgtgaactaggtgggggggcattagtaacactcttgctaggcagtaaatttagaattggacaacatatctgaccagtccaaggatagtatatattttctaacatgctctaaagaagtcagtgagagaaaaccagtcacacctaagctccatcccaataacaacttttcacagaaggtgtttgacctatgttccgtcagtccagactgtcttgcagtcctaattctcatgcatatttactgacataaaatgagaagtcacccgttggaagagttccaaggagcagtctttatgctcctccagagcccccatgggaaactttaagtccacagtgagcttcctgagggtgggggctgagtcataacacccaaggcacaggcaggactcctggcgggattacaataagcaccgtctgatgtctggtatttcctcacccattcagccacatactcaggcctcaatgctgtctgtacagatgttgtcctagctatccaaagatgtcatttcaaaggagcagcattggggtattctaaaattcaccacaacatatatttctgtgtcaaaagaccccttcctgatgaactatgataggaatctgtagcaacagtgaggggccctactgcttctctttccacaagtgaatgagttgatgagaatggcccataggtcacagggctgtgttatgcatgaacatcaacttgtgtttttgctgcaccaaggcaatgtagtttcgttactggcctcatatttgtcaaaataatctacggcattagctcacagatgtcctttcatgcttgcttgtgaacaaacaactttagtatttatgcttcgaaaactttgtataactctctttgttattgctaatatgtaggaaataatttctgagccttgtaggataatgctgccaaggacagcatgtctcaacggcagcctttggtcttcacagacatgtgccaggtacttctgagtcacattgcagccgtgatggtcttcaagcctgggttaacattttgaaggtgccattttctgcctcatataaactattcactctcaggatagggttatatcttagtgataaatcttagtggatttatagcttagcgcttacttagcatgtgcaaggccgtgagttcaatcctcagcactgccaagcccaatgaacaaatgttgatctatagtagtattttaggaatttatttagttttgatttatttattttatttatttagtttttttgagacaatgttttaaaatcatttttatttagatgtatttgtgtgtgtgtgtgtgtatgtttgtgtatgtgtgtctgtgtgtgtctgtgtgtgtttgtgtgtgtgtgtgtatgtgtgcaggtgtgtgtgtgtgtgtgtatgtgtgtctgtgtgtgtgtgtgtgtgtgtgtgtgtatgtgcacatgtgcatgcagtacctgtgaaagccaaaagagggcatcggatcacttggaactggagttacaggtggttggttgtgagttgttcactgtgggtactggaaaccaaacttgggtcctctggaagagcaggaggtcttttaaccaccaacccatctcttcagcttcatattggtatttttaaagtttgaaattatggattgcttttctggttattaaagtggaacgattgggctggagagacggctcaggggttaagagcaccggctgttcttccagaggtcctgagttcaattcccagcaatcacatggtagctcacaaccatctgtgatgtgatctggtgccctcttctggcctgcagggatacatgcagaaagaacactgtattcataattaacaaataaaccttaaaataaaggaagtggggcaattgatagactttgtggtccaaacaagatgacttagtaggtaaagggctctctctgctgtatcatgacatgtgctttattcctggaactgacaaggtagaaggagagaaccaacttctacaagttattctctggcttccacagtgtccaaaccaaccaaccaaccaaccaaccaaccagtgaatagaatctatgtatataattataaggtcattatgtctcctgttttatttttaatttcttaaacatgctagtcatactccttgtcttagggttctgttgctatgaagagacaccatgaccgtggcaattcatataaaggaaagcttttggttggggctggcttatggctcagaggtttagttcattatccttatggtgggaagcaagatggcacacaggcagagagggagagaaagagagagagagagagagagagagagagagagagagagagagacagagagacagagacagagacagagacagacacagttagagagactctgggcctggcttgagcatttgaaaccctaaagcccaccctctgtgacactcttccttcaacaaggcccacaattcctaatctctgctaagtaaaaccactccctgatgaccaaacattcaaatacatgagcctgtggtagcattcttactcaaaccaccacagcccttgatcattttataccattagaacagttaagactgtggctgaatggatatttgactctactgaattttattttttttttgatatacacttaaagcgagactgtctctaaatagtagtagcatatttgttaaaacacagtaagtttttttttaaggatgttttgttttagtttatttatttatttatttatttatttatttatttatttatttatttatttatttatttgtgacagagtcttactacatagcccaggctgtcctggaactcactatgtaaaccaggctgaccttgaactctcagagatctgcctgcccgtgcctcccaagtgctgggattaaagaaggtgtgtgtcaccatgaccatcagaatttttttattgtatatgagcccttggcctttatgtatgtgtgtgcatgcctgttgcccaagaaggtcagaagagggtgttgggtccccagaatttgagccatccctggctgagttactctgccactgagccatctttccggcccctcgtttattgctctgtcatgtgtgttgtcagggtgtcagactctagagggagttggaccactggacatgtctgcattggggtgggcagcagagtccctggctgggatccggggccatgtaagtggaggcaggaggctgggcagcaggcagccatcgcttccttccctctgaccatggctggtgtgacagctgctattgagaattttatcactgaatcaggaggagcatccgggaccctcagcccttgggagttgacccgtgttttgtgttgagatcactcgagcacacgagcactcgagacctgctgagcccgctcttcccattaggaaggggtcactgctgagctcttccgttttggagacatcactaccatggttgcctatgattgtggtctccagcctacagatttaggtatttggaaatcaggaccacagttttggcttttgttttgtttgatttttttccccttcctattatactgtctctcagattttcaccatgttcaccccaggtatttggagcccaggggatccgaatggatggctgcaatggtcatgtggttatttcttgcatcaaatatactgaacatggacaagcaatacaggggcagatacagcatcttttttgtttgttttgttttgaggtggagtagtccaggctggccttgaactcaccatctatctgtctctgcctcctgagtgttgggactcatgacaattaaatacctcatcaagccaggcatggttgtaccaagctttcttttgggccacaaatcagctcccaaatcatgacatggggacttattcttagttatgaatgcttggccttatcttagatcttactttgatctgtttatctagggctttttttttttttacctttctttctttcttgctttctttctttctttcttggtttctttctttctttttttctttctgtggttctttctttcttttttttttttttggtctttcgagacagggtttctttgtggctttggcgcctgtcctggcactagctctggagaccaggctggcctcgaactcacagagatccacctgcctctgcctcctgagtgctgggattaaaggcatgcgccaccaacgcccctgtgtttctttctttcgctgcttcctgtgcctggcttctggtcccaggagtgtctctctctccctcattctatcttcctttccccttctcttttggtcttctcaagcctagatttcccctatttattctccctgcctgtcatccctgcctacctttctctgcctacctatttgctgttcagctccttattagaccaattaggaaccttaggcaggcacagtgaaacaactacacatcttttcaattaaacaaatgcaacataaataaaagtaacacatcttttttttttttttttttttttttttgagacagggtttctctgtgtagcttttggagcctgtcctggcactcgctctgtagaccaggctggcctcgaacttaccgagatctgcctgcctctgcctcctgagtgctgggattaaaggtgcttgccaccaacgcccagcttacatcattaaacaaacgcagcataaacaaatgtaacacaccttcacatagttacagtaatattctacagcataaacaaaagtaacacatctttaaatggttaaccattccacaacatgtggtggcttgtgcctgctgccctagtactgtcaagggaaagacaggaaggcccggaaatcaagaccatcttgtctacctagtaagatggaggtcagcctgggctacatgagaccccgtctcaaaaatccaaagccaactacaataagaattgccttctccagacacgtcattgacttcctcatgaattacactagctagaatgtttcacaaaacactaatgaagaagcatctgttttaatgaaacagtttaatgaacagtttaaaacagtttaatgaaactgttttaagtaggtatttgaaaaggatgttatagagtgcattaagactgtccccaaatactaaaagatattcatgtctcaaactaggcttacaaagggtgtctagaaagtacccagagccttagtcacactgctccgtttgtttctcagactgccttttcaaggtctgccccatgaatcgatactctgcccagaagcaatattggaaagccaagcaggcgaagcaaggaaaccacacagaggctgccctgctgaagaagcttcaggtaagtcgctgccctctttctccgaggctcgcccctgaggctggcccgagagcaacaataacaagcaggcaccgggccgctcgccttgctgatttcaccattgtgtagagatttcagttagagctcaggcagagtgcagaggtaagtagttttccgttgtagggcgtacctacttatttcctggcatgtgggcaacacatccccactgttattttttaaggtgtgccgggctaattctcaacttctcaccaaaccaaaaaggaattaaaaaaaccctgactgttaaatctaattatattttaccctttatagtactttttcccccctaacagtctatagagaaaaaataatatatatatatagtttgactgagtctgaatttgataatactaagttttgtatcatttaaatcctaggtactctcaggactgaaagctatattttgaggttttaatttacctgcttttctaacagtttcacatcatactgtagagaagtttctagttccacagaaccttctacttaactgaaatttgcagtatagaaacaaatggtccaagacaggtttggctgtattcagcatagattgtaaagttgctgccacacttggggtggggtggcttgggggagatctgggagcctagtgtaaatgtacccccaattacaaaaaacttccttgctggacatggtggtatgtgcattaaccccagcactatgcaggcagaggcaggcaggtctctgagcttgagtctagctgagcctacagagtaagttccgggacagccagggctacacagagaaaccgtctgaaatccagctctctaataacacagcctgtctgctttattcttgttactaagtctctgcttgctatgcttccacactgaatacttggtcgtcctcttgcagcatgctgctgagctggagcagaaacagaatgagtcggagaacaagaaactgttgggagaaatcgtgaaatacagcaacgttatacaagtaagtcttcattttgtcatcagagagggaagtcctttatgggtgagccgtcaaactacccacatgtcaagctgtatgaagcatttgtgataccgtgttcttctttggaggggatgatgattagtctgaggctttcagtgaacatgcatcatatcatgtatgtattgaatacatcttgtgccaggcccaatggcgctggcctgcaagtcccgaacataggcgatccgtgcaggcactcggaaaactgatctcttggtgggagcttaagttaccaaaggtaagactgtgcaggagggtttgtaaggcccagaagacatagtcctttaggtggatgggctgatgcttgatgatttcccggggtcaaggggaaagttttcgtattgtacatttatttaacaggcaatattgctttggcttccagtcctcattgtcagggtgcacattgacttatctcaactgcacccccccttcattcagatcttttaggcttcttttgtttgtttgtttgctagcaagtgccccaccttgtttcaaagaagaatgtgaggccttttccaagaaacacacagcacattggtagataaagcaccagttgccaagggaggcagctgggtggaagggaaaataatggtggctggacgaggtgaagtaaaaaatgaggcttgcttacaaagctcagtaaaacccagccaagacaccgctgtcactgtgaccccagcccaaggcactgctgtcactgtgaccccagcccaaggcattgctgtcactgtgaccccagcccaaggcattgctgtcactgtgaccccagcccaaggcactgctgtcactgtgaccccagcccaaggcactgctgtcactgtgaccccagcccaaggcattgctgtcactgtgaccccagcccaaggcattgctgtcactgtgaccccagcccaaagcattgctgtcactgtgaccccagcccaaagcattgctgtcactgtgaccccagcccaaagcattgctgtcactgtgaccccagcccaagacaccgctgtcactgtgaccccagcccaagacaccgctgtcactgtgaccccagcccaagacaccgctgtcactgtgaccccagcccaagacaccactgtcactgtgaccccagcccaaggcattgctgtcactgtgaccccagcccaaggcactgctgctgctgcttggccacaggagggaccctgctagagccccggtagtggaggtctgtagcatagagcccatctggggactggaagcacattcattcccagaagtgagatcaggaaaatgtttcccttgagtgctcataaagaagacactgtttaaaatggtaaacaccaccctgcacaggttccttacagtaatcaccacaatgaggcacttaacaaggccacattaaagaataatgtctcctggtgttctgtcatggacaaatggcagtgtgccagagggcagggcaaagctgttccccacaggacagggtggagggcgtgactttcggcttggtgggactgcacatcccctaagtagacttccagagatgatgtctcttcactgagctttggtgactcatttaagctccttgtcaagtacttcaagtacaatgcttgtcttacttaggggctgcgttctgtgctttgacatggatcctggaggtacatactaaggcttgagggtgtgtgtgtgcaggtatgcatgtgtgtgcatgtgtttatgtgtgtgtatgcctgggtatgtatgcatgtgtgcatgtatgcatatgtgtgcatgtgtgtgtatgcatgtgtgtgcatacatatgcatgtctgtgcatacgtgtgtgcatgtatgcatatgtatgcatgtgtgtgcatgtgtgtgcatgcatgcatgtgcatgtctgtgtgcatacatgtgtgtgcatgtgcatgtctgtgtgcatacgtgtgtgtgcatgcgtgtgtttgtgtgtgtgtgtgtgtgtgtgtgtgtgatgtgtgtgtgtgtgtgtgtgtgtgtgtgtgtgtaagcctgaagtcagcctcatctcaggtgttgttcttaggagctgccccatggtgtttttggagactaggtctctcacagcctggacttgtggatccagctaggcaggctgccagggagcccagggatacacttcccgagtgctggggttacaagtgtgtgcctcctcatcctgctttcggttttgattttttaacttgggggattgaacttgggccctcaggcttgtaaggcagcacttgaccagttgagctagttcccagacccatggtttttcatgccttcattagtacaataagaaccaagggtagggcctggagttttacaaaaagataattcttgttttttcaattaaaaaattgccattttactttgaaataacttctgcctcatcttatgggtactaaaatgtcccttctcttttggctgattttgaaactagatgggaagtttgcctttgtagttctacccaataaggttatattttgggaagactgtctatggtgtccatggggaagggagaggtgaggaccagtgtgcgttagtactgtcgatgggcagggtgcttagggtgtggcgtaggcctctgattttcttcagcagattctgcttgtgtggctgtaagagtattggaaatgggtgaggttcaggcaccctccggcttttttggaaagcctgattttagtctgctatttctcagtggatgaaggtgtcttcagtgtcccctggggtatcttccacacacagtcaccatcacccttgaagcagaacttggggtggagacgaggaggagacaggcaggcaggttggcaagttggaggttgctgagccttaaagtagctcccgtgtttagtttccagcatgagttgtggtgtgtggatttatgaatgcagctacctgaggagaccacagatacaggctctaacactcacctttcctctgcagctactgcatataaagagcaacaagtacctgactgtcaacaagaggttgcctgctctgctggagaagaatgccatgcgcgtgtccttggatgccgcagggaacgaagggtcctggttctacatccatcccttctggaagctgagaagcgagggtgataatgtatgtgtgggcaaaaccaagggagaagcaaacaacccacggtgtgctagagaactccgaaagtacagtcttcagccagttaactctaaactacttaagttagcatagggaatgatgggctgcattatggcggttttacatatatgtgtcattcattgcactttctaacacgtttggcgttagcattgttttactaggttaagtgcatttgtttacaatataggccacgctcagaaatcacaggacagttaatcaagttagcagagagccatggcaatgttctgttcagtatcttcacagacaacttcttacagtgttgtcacagtgtgcagggtttgagggacatctgcccactgtcaatgacaataaactggggtgtataaatggctgtgatgtcgccagagcttagatcagcggttctcaaccttcctaatgctgtgaccctttaataagttcctcatgttatggtgaccccaaccataaaatcattttcgttgttgctccataactgtaattttgctactgttatgaatcataatgcaaacacctgtgttttcctatgagatggtcttaggtgacctctgtgaaagggtcattcaagctccaaaggggttgtgagccacaggttgggaaccactggcttagatcttttctgctattttgtggaagagaaaaaaagtgagataattccataggaatcattgcctcatcttctctatttatggagatggctcatcttctctatttatggagatgcttctcactatattcttgcctgacttgtaatatagcataggctgacctcaaactggtattggtcctcctgcctcagcatcagcctactgactgctgggattctagttgtgcattgccacacctggttaacaatttgacatttttgtggtagtccttagctcctggaagatgctcagtaaagacaggtttataagtagaactccacacaaatgccaggtgatcaatacttgccgtgtggaaaagctcatatgaattctgactgaattgaaaatgtaattctcctgccatgtttcacaatcagtacttgggttgcatctttagggtgtttggaggtatttcttatgtgagaattgtcttctttttatagagaatctctttttttccctcagtgaattttaaagtacaaattcaattctacaggacacaagcgccatgatttaattgggttagtaatttttctggtgatgctttccttaggtaaggtctgtgctgcatggcatgcagggatggactggattcttgggaaactagttctcccttcccctgcttacttttgatatgaagtgatgtgtgctggcagcatggcgcgtccttacactggatttgtagttaattacactcaactctcaatcattcaagggctaaaatgtagtttgggaactatccacttctcttgtaatggtgtccccaacccccaactcctctataggtggttcatgaaaaccaaacgtcaaatcaaacaaatcctaactacgctcaaactaaaagagtgtgatgacatggtgaaatgagcctctctctgcctttgggttgctgtgaatttcatggttccctctgctgattcctcctttgactttctctccttgcttgcaagccacttgatagtatcaggagagagttgaatgtaacaactactttagacaattagtttcagcagaaacaaaccttgtctttgtggccgccccacagtgcgttaagttgttcttttctggatgcactccacaaagtcccgctgccacagtcttccaccttcttgctgaaaccgtcactgtgttcgttcacctctatatggctttgtgtgtgatgaacgttgccgaggaaggctggcatgcccacagccttgtgtcagcctcgcacggacctgtatgcaactcttgttttcttggctaggaacaggcagtgttttaaaacatcagactgtagtttattgaaggcagttttgccaatgctgtctctttgagtggtttaattatgactgagtttctgcgtaagtatcttaaatggagaggaaattgcaatgttcagaggaattttaaaattgcagtttggtatttagcaatgagcgaaggagagacttgggttgtgtgtaaccaacaagaagtcctcggggctcaagtggagaatgatgcagatggcagcctggagtgcacgctgttccttgagctaagtgcatgaaggtgcactaggtaggatgcatggtttgggggaaacgggtttacaggtcccttcactgtcagctgtatagaaagtccttcactgctgctaagttactagaaaaaccaccgaggtcactggtgagccgaaaacatgggtatttcatttccacgtgtcctcttcatgtttgagcatttaactcttttcctttttagtcttgacctgagaagacaagggtcctttgccctgatgtagatttagaagcataaagaggtagaattcttgaagtcagtagaaaattctaactcacggtgaggaactctggcaggcagattttgtgatttcacagaatgacaagcctggcatttgtagcagaggcagagatagggcattggtgttttctgattcccactgtgaggttcctcttactgtcccaaatgacactcagagcagggacagccagctgcaggtggcatcgttatcagtgaaatcccatctgcagcgtgacatggtcactgcatagacccaacagaagtctttgggattataagatgtaaaagcaaagggcctcgccctctggttatgcatcaaatagagtttcttagggtccgtcaggcctgaagcctcactcttctgagaataattccaacacatctagtaatgcgaattccccgagattatggactgtttcttatacacacgttttccctagtccctcttcagtgctatctaaaaaatgatatactttattttctgtaaatgagtgtttgctggcatctgtgtttggaaggtgggatgaggtctacaggcctgtcctacaaacagcaggcactcatcccacaaagccaagggcaccttcctgcgctgggttactgaacttgaggcttcttggacacagataggtctctagatgcagcgtgcggcaacacagctcctcaatagtacacatttagggtcatgggaccctgaaaatgtgagcgtgtgttttggttaaggtacatggagatgtcccaagtcccaattgttttctcatttatgtaacaaagcaatctttaattgttctaacatgtaattggtatgaaacatgcaaagggaaggtttttgattttgcttcagagtgggaaagccccacagctgggaaagtagatgccacaaaaccgtcttctaaagaaattaagggtggctggagagacggctcaatggttaagagcactggctgctcttccagaggtcctgagttcaattctcagcaaccacatggtggctcacaaccatctatagtgtgatctgatgacctcttttggcataaaggtgaatatacagatagaaaacacaagcacacacacacacacacacacacacacacacacacacacacacacacgtatataaaataaatcttaaaaagaaaagcaaaaacgaaaaagaactagcacaagtctctccagttactaaaatcacactgttattgccattaagaaaaggtaaattcaattccctcaagtctaattagatataaagatatttgcatgtaaaatagacattgctcttatcacacagatgactataaatacagacttaaatttttttagtactttcccctggaaccctgataattcttattttaaaagaaacacaggctcctacagttttggttttagacatttcaagtaaaagggaaccgaaagctccaggcctgacaaagcatagatttttccaaggttgtgccctgctttgtatttcctgaacccagaggtcagatgcttcataattctgagattcgggatgattagttaagcagacccacagcctttcggtggagggggagcatcgcctttcagtggggagggagcatggagggatgtgttctctgctaccctggtgagattctgaagcttggctagaaggaacatcgtggtagctgccttcactgtgtcagccgcaaggacttttgggaagaaaatcgcctgattctgacctctgagaagccccaggtgacatggagactaacggggactagggtttggcaggcatggaacactgaacacgcttctcagggagaagagtcaagtcacaatctgtagaatgacaggaccgggaggcaggctgctggtgaggactgctggggtgtttccagcctcagagcatcagggtgtgtttctgattcccagatcgtcgtaggagataaagttgttctgatgccggtgaacgctgggcagcccctgcatgccagcaatgtggaactcctggacaacccaggctgcaaagaggtgagtccaggcgggagaggaaggggtgctgattttctctagggggagggaggaagagagtaggacagaggaaggaagacagaaaggagaggagggagagaaggaagagcagagagggggagggagggagggacctgttttttcctttggtgggtcggtgcttgcatatgtggtgagagagtgagcacctgtatggggtgggggcaggaggcatccagacgctgtgtgcctgtggttcctgcaatggtagctctattcaggacccttttgttttttttaaaaaaaaaaaaaggaaaggggagagagagagagagagagagagagggagagagagggagagagagaggggggagggagggagaggggagggagggagggagggaaaggggagggagggagggagagcgtgttgtttcttgattctcttgagcaccatgcaggcagtgttagcacccttgggcatctgtaggtactgcctgtcttgaatggttctttgaagatgttttttattgaggcctacactttgttgtccatagttgtcttttttcttctcctgtttggaatggtgatttttggtacagaacacagagtctactgtcttatgtctttaacatttgtctccaccaataggtgaatgctgtcaattgcaacactagctggaaaatcactttattcatgaaattcagctcctatcgtgaggatgtgttgaaaggggtgagtaagccctccatacaaacctttattctcaagcgccagtaatctgacatgtgctcagagccttcaaggataggcgaaggccctgcagcccagagtgcccaggtcagaaaggaactgcaggacccccagtttcctggtggtggccgctggatggttaccatttcctcacctgtttctccagggtgatgtcgtgagactgtttcatgccgaacaagagaagtttctgacctgtgatgactacgagaaaaaacagcacattttccttcggacgaccttgcgtcagtcagcaacgtcagctactagttctaaagcactctgggaaatagaggtatgtacttttgggggggaggaggtttgctaaatatttatataaaaagataaagatcatcaggctgttggctttgctgttacgggtaacattggtggcatgtctataacatggaataatttttgtgaattaacacataatctctttgtggctgtgaccaatttgaaaggaacatgtcacccattataaagcagaacaaattaatcaaggggttgaaaagagaaaacatttccattgtgaattcatcagtgctgatcagactggaagccatgtgcctctgtggcactgcgtcatgactggcagaggcagagacagatctgtagtgagagctaccagatgcacctgtggcactgaccacacccatttgggcgtgatcacaggtgcgtatgtgagcgtgagcatgtgggatttggcctgggctccaagacaggctgtgctctctcttggttctggtcgggtcacagagagcggcaggacattgatcctcggagctaacttgtgggttatcgggttctcatgtaagtgacttctccctgaataaaattaaatattatcctagtctcatgtatcttaatctgtacatccacacagaacctatagccacggaaaatagcgggtatttttttctttgaatgcatcaaaatcgagatacgcatagctaagcatgctattcaccaggctgaggcaggacagtcacaagtttgagatcagccaggtctcctaagcaagctggaagaatggttgttaagcagctcctggcaagggcttcatgcagtccgtggtgcctggtgtggtgcgggtgttctgccaagaccttcccagttctgcagcctaatgatggtacatattagacagggtctactttatagtccaggctggcccggaactcactgtgcagcacaaagggatcctgaaccttttgtaatccttgtgcctcatcacaccaagtcctgggattttatgtgtgagcctctgtcccctgaccggaaacattgccttttgcagtaagacagtgtttacaggtgtgaggcacgggctctctcaagtgaggtgtgacgtgtcttatgctcactgatgggaagttgtgtttttctcccacattgtgctctcgggggtacatgttagatgggttggcatacacaacaggttactctggctgatgacacctgctggctgccatgtggataccattttgtcactgaaactctccctctctgtaggtggttcaccacgatccgtgccggggcggtgcaggacagtggaacagcctgttcagatttaaacatcttgccactgggaactacttagctgccgaggtgagactgttggttacagtgttgttaggtctctgcctgaaacaacgaaccaggcaacccctttctgtgaaagtcattgcattgtcagggaccattcctgtgatttgaatattgcctgtcatgtctggcttggtgtttttctgtccctccctggccccgctgttatgataaaataccctgacaaaaacctcaggtgagaaaggagttattttggctcatggctaataagatacagaccaccatgtggaagtcagggcagcagaacatgaaccagtcatcgagagctgatgagggcttccgctcagctggttctctcctgttcatacagctcagggaatggtgccgcccacagtggtcaagtctttctacctcagccttctcaggattaaccccccttggccacccacagacccttctctcagctgattatagagctcatcaagttggtcactacgattaatccttacagttagactatgagtcactattgtgtgtttgtatgtgtaatgcatgtatgtttcctgcgtgtgtgtgtgtgtgtgtgtgtgtgtgtgtgtaggatgaatgtgcatttgagggcttgtgtgtggagaccattggtgagcctcatgtctttttgctcaggattccatcccctatgggtttggaggatcttggggttgaagactagatcaagagttaggctcctcaggatagggcggctactggagtaatctctgttattcgccaactacctatagcctgcacgtttagtatgtgtttgtatttcttgcttggcattgttcttgctggttgcagttctagttttctgtgcgttcaagcctgaatgctatgtcattgggcaccgtggtctgcatgggagacagaaccaggaagctttcctcagctctgtatatacatcacagatcccactttttgttttaagctttgtttttaggttgtatgtggaaacttgagaggcccacattgggtgtcagatattgctggagactttgccttgtctgggtcccatttgactggtttctctccacctaccaggtcctcacaactgcttataagataacggctcactgtttgtccaatggcttaggattattactggctagctctctctcttataaaattaaaccatatctactaatctgtgtgtggctgtggcttactccggagatgctctggcatgttacctcctggtggctacatggaatctccttgactccatcttctttctctatctctgtttggatttcctgtctggctgtattctgcctgtctattagccccaacagctttattaatcaaccaataaaagcaacacatatttgtagtatacagaaggacatcccatgtcatcagggtctctcacttttactggagctatctgattaggccaggcaggttggccagagtgtagcatgataaataaaagacccagaaacagatattggggttcaagcttcaagctgaagatcagaaaagcaaagcagccagccactaactcttactctacctcagactgaaaggtgatcctggctccaccaaacctcagactgcaatcccagacggctaggctctcctcagcatggctggaaaatcctaagactgactactgaagacctgctcctatcttttatatctccttagtgctagaattaaaggcatgagctttgttattctttcagactgattcaatctcctgtagccctgggtggccttgaactcagagagattcatccacctttgtctctcgagtcctgggattaaagatgtgtgccaccactgcctgatctctatagcttgaggctgactttgctttctgaatcctcaggtggtaagctttaataaatcataaataacatatcaccacccagagaaactgacagaggtaccacattgatgaagaaagtcattcagctcattaattagttagcttaggtgttctgcaaaagcagttgcatgctcttagagccatctctctgccccccacccctagtttattatggttaatctgaggtgctcataacagtttctctgcatttggaaatttggggattgagatggggctgacagtagatttttatctcatcagtcccaggaattggagaggatgatgtgtttagactggaacctccaagaagcctgggagcctgagaagctggggacaactagaaaacccagtgggttgaatcataagtgccaggaagtcagggcagtgtttcaccggggttggggtgaggtgtgcgtgcgtgcgtgcatatcgtgcatgtgtgtatgtgtgtgtgtgtgtgttgcacaggccagggtgtggccatgagtggcttcatgcagagttcttcaggggagcccagctgaagggagggtgggccgagttctcgaatgcccttcaccgggagaagcagcagtgatgaggggaagccctaagtccagtctatgctctgtataaaatggatttaaaaatcagacaggggattgtcctccttttgcatagaagggaagtgcccagcaggggacctggacggccagggttgtgctctctttcccaccctggggaggaatatttatagattaaaacatggatgtgttttagacaatcctggtcaaaagagattacataatcctggagctgcttttgggtttacagtgctaattaggcaaagagagcctataatggtacaaaggattgtcatacctacggccccctgtgtgtcaggctttaagcagacatttagcctctgtctggacccaagttctcttgtgtgagacccaggcggtcatctgtgttctgaggggttgtgctggaataaagaagacaggaatgtacagcaccatgttcacaaaaagtctgggagatttgaagtgcctctcctctgtggagagtcaggagagaaggcggagagcagcatcctgtccccatgagcatcaatgtccttgcaaccagctagtgtgtagttgtttatgtgtttgttcatccatctgtgcattgtgtatgtgcattgtgtatatgcctgtcagtgtggatggtgtctctacagtgtggacagtgtctctgcagtgtggacagtgtgtctctgcagtgtggtcagtgtgtctctacaatatggacagtgtgtctctacagtgtgaacagtgtgtctctacagtgtggacagtgtctctacagtgtagatggtgtctctacagtgtggactgtctctcacactacccagctctccactgtgaacagtgtattacactacttggctctgtacagtgtggacggtgtctctacagcatggacagtgactctacagtgtggacagtgtgtctctacagtgtggacagtgtgtctctacagtgtggacggtgtctctgcagtgtggacagtgtgtctctacagcgtggacagtgactcacactgaatttgcactcaccagagactaggttgctgactggataggaactatggctgctgcaaatacagtggtttcctttcatagagaaggttatatagaacctttctctgagaggttatataaacaagaaaccttaaacagataaaaaaataatgtaacaactgtgttcaggctggatgctgcttttggactactgcactgtgtaatttgtcagtggtttggacaatatctggagatggttggctgacatacttgggaagggggctgggatctgccgctagacctcatggatggctaaggcagagggccattttctcctctgctgacagaattatctggtcccaaacacaaagcatccagaggccaagaaaccttgctctacctcagtctgacatgaaacagtcacttactgaatgcctccatgtggaagagctctagagaggcacagatgttaactgtggttgctgtctgctaagtgcctgccgtctgtgggggactgtacagcgcaccaccgagccatatatcggctcttactgtgttgattgctcccatcagatacatctgagacctctggctttagtaaatgtttaaattaccaacatctaggtgtgcacactaaaatcagcaagtttaaagatggcaactttaagagcagaaaagagaaagaaactctgcagcattatttgtgaacatagtgctcagtgcaactcttttaaccagcatttcacaaggaaatgaagttatccagataatcgtggtgagcataagattcgtgcggaacagcagaggccacaagtcaagggaagccgggtgttccgtaggctgagactctatagtgaattatgcagccagcatgcacagttgtaaaccgctgacgaataggatctctgtaaaagattggctgaatgtagaaaacataacgacttagggcagcactgaaggatgtaattgggttttactctgcaagaccacagagtaagccaaggtttagaagaccccccactcacccaccaccccacccccggccatgcagttttacatagtgtggattaattttcaggaaatacgcagggccataaaactgtggttgaaatctatatctatgtatttaattacagatcagataataaagacacgtggacttcatgtggttacacaggcatgtcactgggctctcagtaagtcccttccacggggcatacatgagttaggtggccagtgtggggatagatttcgggcagcacagctgtgggctcactgatgttgtgacttagatcttttatgcccttgtgacaggggtcatcttagaaacaggctagcatgggccttagaatcatctcccatcatgtgggaagggccactccatcacagcttccagcctgctgcttcctacattttctcaccgtggagattaaccactaaagcaaatgacgtgataattctttcccaaacaagacaaatcagagaatgtaagataattttatttgttaaagattccatattaccaagccaggcggtgatggcgcacacctttaatcccagcactcggaaggcagaggcaggcagatctctgtgagttcgagaccagcctggtctacaagagctagttccaggacagcctccaaagccatagagaaaccctgtctcgaaaaacaaaacaaaacaaaacaaaacaaaattccataatacctttggttttgcaagacagggtctcattctgtctgggctggaactcactgtgtttcagaggctggcttcgagttcctcatatcctgtctccccctcccaagtgcactctgccatgcctggctttggtagcatctttagagagtggctcacccagggcttggcggtgtgggtggggggggggggggttccctgggtaagctgcttgtcgggaaagcaagaggccctgagtttgtcctcgggtacatgcctaaaaagagccaggcatggtggcttgtgcttgtaatcccagcagacaactaggagggttctaagccagtgacactgtgtcaacaacaacaaaaggtgactggtgcctgaaaaaccgtgcatgtgcgcacacacacacacacacacacacacacacacacacacacacacacacacacacacacacacgctgaagaaaatgaactagcatatttgtttgtagataggacaagcttccaccagatggcactaagcacttcctaacttcgcagttaggtgcagttaattaaaaacttaatactagcaaagaggtcaggcttggcatctcacagttgtgtcccagcactcccagagggggacgcaggaggttcagaagctcaccccgccccccagcgactgtatagtgagtctgaggccagcctaaacttcaggagacattttctcaaacaaagaaacaccaaccaaaacaaacaaacaaacaaacaaacaaacaactcaaaccaaaacaaccagggaaatttgggggggggggatggttcagcccattaaggtgcttgcttccaaactgtggacctattgctctgcagttctgttgggtctcagcgcccatgtctccagaggatctggtgccctcttctggtctcaatgagaattgcacttatgtgcacaaactcatgagtgtgttccccactgcgcccccaaccaaaaaaaaaaaaaaaaaaaaagcaagaatatgagcacgtgttctgggcttctgtgatttcagtctgtttcttactgttgtgtggatgaaacactgagggcattttgcagctggcattgggactgttgactctttgcaatgatctgactcctctcctccacgttgcggtcgtgtttaactgtcttcaacagttgacgaagacgggtgttttttgatattgccagtaatctatgttcttctccttttgaggttcccatggctctgtggaccatgggtgtgatcttgcccatctcactgccttaaaagtgtagcaaatattattaaagcttgggttattttgccataacgcagtgatttctctcctagttcagggttagcatttgagaatcaagcatatctttctgtcgcagtttctatacttagatgctgctgaatgcaagcctataagattgactttatagcattcatttaaaagccttgtttgtcttgagtgatcttccttttagcttaaaatcctcgtggtctaggccctagacctagggtgatcttccttccaacataagggcctatccagtgtggaacccttctgttttgtttcacacactctgcttcctggaggcaggagagccagatgcagcagttactcagggtgtggattccatccctcagacatgtgccctcaccctgacacggcgtgggtgtgaccgcgtgaagtccctcatgcagtgcgcccagtgaagtagaatcgagagtattcctgagaagcagaattgtgaggctaagtggataaactctccaaacatatcttaaaagtatcacagagagactctgcaaataagtcccgagggtgcgggtgttccttctcctttacctgccacttaaaattcagtcccgagttcaaggattgctcagacccttgaacaattcttgaataagctagcgcatcacagactcctccctccctctctcctctgacccgtgttatttacaagtcattcatttctgcctcctagctcccatcacatctgcatcatggtatagctgaccacatttatgtcttattttccttcctaggccacagggtcagtggccagggacgggactcttggctaaaataccactcgacacaagtttgccccttagagatgctctatcaattacaagagttctctctctcccttgtgccagatttataattcagtttttaacataatgctgtattttccttcaaagtattaaaatatccagggacttccctagccatcattttcttccttctttagcaatatctttttctgtaatcctttgccgataactttgataaatacggctgttgctctatttggagaagggacaaagcggtagaatttgaggctgtgagtttatttgggtgttttcccttctctgtagtgacaaaacaactcgagagagggaatatatatatatatatatatatatatatatatatatatatataaacacagataatcataaagggttaatgacatttcagtgaaaatcaaacacaagtacaaaaccaacatccatgtcagcgtccactaaagcacagcagatgaaaacgcctccctcgcctggtacttaagcattttcacctgtgtgtgggcatgtgtgtgtgtgtatgtgcacacatatgtgtgtgggcatgtgtgtgtgtgtatgggcatgcatgtgtatatatgcgtgtaaatgtgtgtgtgtatgggcatgtatgtgtgggggcatgtgtgtgtgtgggcgtgtgtgtgtgtgtgtgtgtgtttacattcgtgtatatgtgtgtgtgagcatgtgtgtatgcgcatgtgtgtgtgggcgtatgtgggggcatgtgtgtgtatacatgtgtgtttatgtgtgtgtgtgggcatgtgtatgtatacatgtgtgtatgtgtgtgtgtgggcatgcgtgtgtacacatgtgtgtatatgtgggggggcatgtgtgtgtacacatgcgtgtatatgtgtgtgtggggggcatgtgtgtgtgggcatgtgtgtatgtgtgtgtgcgtacatgtgtgtgcatgagcatgcaggtgaatgcagggattgaactcaagccatcgtcactgtaactttttacttaacactagttttgctttgtctttcagcttaaccctgactatcgagatgctcaaaacgagggaaagactgtggtgagtagaagtccccgcagactgtcccaagcgtttcacaccctggtttacataaataagtcagagccttagtaaccagcttgagtgctgtggcccccaggacagagcctctcaactgaagggatggtgtgagaaagaggggcgcccaggggatctctgtccagcagggggcgctaagggacctcttgaagactggttattgaaaggcattgaggcttctgtagtaggtctaggtccagtttccagaagtacataagatgttaagataggacaggaagactctccttcttggatttaagatgatttgggatctgcttgaggggagaaattaaaactgcaatccatgtgtcatgggtggtgtcttgatatttttaagtgtccttcaggaatgactgtctctctgtctctccgtctctcccgcctccaatctgagattaaaggtgtgctccaccactgcctggcgagtgccacactcttaacaccagttttcacaagcgtttttcatgttacacactctgctcatcccctctctgtagcaggggtgtgggggacagtagggttagctttatttaaccaaagttcggaaactcgggggaagtagatgtagacaaacctctgggttagacacactttgagtgtgtgtacaaggtggcagatgttacttcatcatttaaaactctgtccttaggtgggcagtggtggcacacgcctttattcccgtcacttgggatgcagaggcagatggtctacaagagctagttcccggataggcgccaaagccacagggaagccctgtctcaagaaaacaaaaaacaaaaaacaaaaaacaaaacaaaacaaaaaaccccctctgtccttgtgttacacagtgttggtcaggcaggaggaggacatgttgacactgtcaccagggatctgttaataggtctgatttggttgtcagtgaagaccactttgcacctgccattatgtacagtcataactgtaattagtcaaataaacaaaaacagacccaaaagcaaaagttaaaataacaaacaagtcagtatcacccccctcccacggccagccgtctgccggtctgtccatctatctgtcttcttggagaagtgtctctttagaatgttttttgggttgtttattcttttgctgttgctttgagctaaaaagagtcacttctgggcgttcactcctcgtgaggtgtacacattcctccccttttccgaggcgtctctgcctctgtccctcatccctctgttttatggcttggtgtaatcccatgcatctgtgctttttgtcccctgcactgtctaaaacatcctcacacagacagtatcatgttgcgtttctttctttcttcttctttttttttttcttgtcaggaaaatgaaaatcaaaaccacattgtaacatcttctcaccccagctagaatgaccattgtcaaaaagacaacacaacagattctggcaaggccatggagaaagaggcctcctacaaagctggtggggtggatagtcggtgtgaatacagtgtggtaattcctcagaacttaagtgcggaattgcagtccaacccagcagacccactattgagtaacaaccctccgcagataaaagctagtatcgaccctcagctttcatgcctgattccctaaagcatttttcacaccagctgagacgtggaactagcctgtgtccacccacagctaagtgggttacaagtgtgcaccagtgcatctgttttatgtggcatggggcatggaacccagggccttgtacatgataggcaagtgtcctaccgtcccagcctcagccccagccccaagtgcctgatttaaatggtggcagtgtttgcctgactccccaggttcgtagtctatttttgtatggcttagtaggtccagcaagaacttctggacttggggggctggagaggtggcaatgctcttccaaaggtcctgagttcaattcccagcaagaacactgtatatatacataatcaataaataaatcttaaaaaaaaagagcttctgggcttgactcaatcccgttggacccctctttctattttattgtcagggtttaagtaggagtggagccggggggggggggcgggtcaggctgctggcccagtggaagttcactctgtgttcaaacatctctagatacaggtgggcttacttgattggttaggcctgtttatatttatacttgttttgagtgaggctgaagttttggttctggccagaggaggagttcacatgctactttttgtgtctagagtgtattactatcatgtctgggccgcttcttcagcaggcccacttgtggacattctggagagacctgctttccttgctgtctagtgggctggtgtctgcctgcccacctcaccttgtactccaagaaccaagacaggtcaaaaaaggtgttagtaggtttaaaaaaaaatacaagtagctggacctgtggtgcagacctgtcttccaagttactcagtggctgaggcaggaggaagggagaggggctgagagagccgatctgcgaccatgctgattattttccttaattttccctgtgtgttggcgacttaatgacctgctaatttttttccctgtaattcagaaatctttatcaaacaccgccttctatatttgaactttcagaggttaatgcatggtgtcgctgagatgagatggtgtgtgtgtcagggctcccattaagaccaaattgccgtgttcattttgcaaaggggcctgttatttccagtcttacaaatgcacagcttctctgggtacccggcaaacattggtaccttgtcaagcccagccgggtacctcacggtcattatttcttcttgaaagcccacatcttttcagacagctctgcagaggggattttttttttttctgcaatgtcattcatgttagggggacattgccgtgtatatgtggcatgggacctgatccttttgaaggagcgtctgtcatggaggcttgagggggacgtttcatggtgtctgcaatgctgacacacagcactagataattcttggtggtggtagtgggggatcttcggtgtgagtggtgggctgtcacctgcatgggttgtagtgggtgctccctgcatggtagtggggtaccctctggatggtagggtgatgggcagcatcattgatctcatcttattggggtgctagcagcaaccacacccctgccccagctctcagttgtgacaaccaaaaaaaaaaaaaatgtgttcagaaattgctagatgtcctctgattgtcaaaaccctcctgtgtggcaaaccacagacccgagtgcatttatatccttggggatgttctagagctggagtctgttgacacagtactttcaaattctgttctgtagagtttggagatggggagtcaggtgccagcagacctccacactgctttgggttttattccaggctcactggcagtaaggggtgcaggctgggcaagcagaaggggtcccgctctggggaggaggcttacagagatagcgtgcttgccacttccctaggcagcctggagtgtgtggcttccccaaggcagaactgggagggtggggatggggtgggtgggcagggatgccagtgacaggcgacacagcaacctcctgcagcctgaacctcagctcctcccagcatgtctcaggctccaacagtaccggcaatgtgaagtttgacctaaaatttggtgactcactatgagtcaccacaaaggtattctggggtgtcccgaagtgcacctcccgggaggtgccattagcttctttgtagctttgcataagggcaggtttctccctgtgtagccctggaaatctgtgccatctggggccgagaagacagctcagtcggttgagtgcttgctttgtaagcatgaagtcctaagttcaaccccagcacccacttacagtagctgccagtggcggtgccgtcctgtaaccccagcactggggaggcagaggctcaggcaggctcctggtggttgctgggcagtctgcctccaagtcccggtgagaccttgtctcaaaaactgaggtccaagattgatctctgatacacacacacacacacacacacacacacacacacacacacacacacagacacccctctgcacccagacatgaggacatgcacagccactcccatgtgtacgcgcatgcccacacatgtacaaacttatctgaagcgtacctgtctgacaagtacccaggggacaggaggcctgggacctgagctcctaagctgggcattcgtcagagagagcttgctggtgttccattagacacctgtttaagctccatgacgaaaggcaaactattgtgcttctgaaatcccctgcagggagctacagttgctgtctttctcttcccttagaaataagtgtgggtttataaacagaatccacaaagtccgtgagtttgaacagagttgtcatcattttgttaagatacagggtttcctttcttgtctattgaagctacgtccactattatatatgtaactagaatttttgggtggctctggcagtcctgacggccaggcttgacgtcctgatgtaccagttagagagagaattgattgtgaggagcagagaggggaaacggttttagggtggccacagaggaagaggagcagatgaggggccagtgagctcgtctgtcttcagggtcctggctcgagctctcggtttaaccagagtaagcctgggccccgactatgagccctggtcaaggctccatctggttacagctctctcacaccaggctgcacaggccgtgtgaagttaccgctgccaccttcacttgactggatcaatgggttcccccagagtgatcacttctgctcagggtacagcctctacccattgaggatttctcttcttggattcaaggtgactgcaggctgaggacaatgacttctccaagggcattgagatgggggaggaagacagacacttgtcagatccccttcctacactcagggtcagtctggcttctgagacaaagtgaaggagggcagagaagccaggcttccaccctgcctctcgccagcctgtgtggcgtctgcatagaagaacgttttccaggtgtcttgtatgttcataactcattattcatatttaattacttaaaaatgccaaggggcaggcttaatgtttacttccaaactgtttatgaagcagagtctgttaaataaattagagtgtgggaagccaaagcaggaagcttcagacagcagggccctcgtaaaagatatgtaggcacatcggaagtcttccacacacagttgtgaaatgatttatgtgcaggaattttcttcatattaaaactattttccaaagaccagtgggaaggatggggaaatacaatagcacattccatgtgttctgtctgtgtagttacaaatcttgaattctgtggataattagcagtggcttgttttaattaagcctaatcagtgagtttttaaaaataggtgtgttggaaagagtcattgcagtgcaatcgtcacagtgcagggagacccctgaccactctgattgggccccttaggcagacattaccaaggagaaccatataggaggccatctctaggaatctagatctgaaatcttcttgtaaatttaccaaagtcatctcaaagttggggtgaacagagggctgaatcccactaaatgtacagaccacacaaatgctgtcaactttcagatcctaaatagatctaaatagctgtatcagttagcacattttccccctggagtggtgtgtatcaaaagataaattataaggtaaggggcaggaaggctgagctaggaaatcagatggcatacttcttttagggagacagtatttttccaagaatgctggcaacttctttggtcttctaccagacactgttggaaccctgaacactggccctccaattgttgaggttgtgaaaccctcttctgccaataaagcttgtcttcaaaacatggttcactgcaaccaataggaacttacttccctgagctcagttgtgtttcaattataaccttccctatctgcccaaaccacttaagccctgcggtagtgcgagctgcccatgttccatgtgttggaaacttgatcctcagtgttgcagtggggttgggttccctcggaggaagtgggcatgagagacctcgctcatggattcctgggctggtctagggttggtgtggcttgtggcagaaccaagcctgctgggactcagttgctctggctcatagtgtggtattctccatgtcatgacgcagcaccagggccttcaacagctgtctgtctgtctgtctttggctgtttacaaggatagctttttggtttgttctgcagccagcctggggcacgggtctctgtgaggtagggactgactgtggtttttgctcaggcctctctgtgaggtagggactgtggttttttgctcaggcctctctgtgaggtagggattgtgatttttgtatttgaatgtgatcctgcatggttctcacatcctcatgcccacagggagagtccctgggtcacatgttttcataatggcataccatccacagggtgggtacaagggttccctttctctgcacctttggccgtttatcactggaccttggtcatgctgtccttagaagtgtgctgcctgcagcagttttgatttacattccccctgtaactagtgggacctatatgcatcggtcatttgtgtgtcttcttgagtccatggaatttagaggatttgggacgctgcttcttctctatgtttgatataaatgcagagggtacgaaaccactagagaaggggccataacgattgtgatttaaggacatgctcagattagaagacccctctggggagcatggaccgtatgactgcccataatcgttacaaaggctatgtgcctgatcttctgggggattcagagtagacactcctataacccaatggaagaacgcaaactcacaccttatctccggattgactggagcagctaacactaaatctgaagacaccgaataaccttgagcctcttcaacagagagatggagagcttccaacctcaaagaagaaacgccagactggggagaagattatgtacacgctagtctcagtaccacacggaaatgacatcgcatcccttttcgaacttgatgccacaactcttcagagagctgactgcctggttccaaggtaaaaagaaatagaaaataaaaggaaataagtaagtaaaaggaattggggtgaacagatgcttctttgaatagtcctcccaacaggaagaaataaaaaagtataattacaattttacaacagaagggagcatgagtggagaaaatgcatgcaaagctctgtgcctctgtcaggtgagctcatcaacacaacttattttatttgtatagataactaaaatgtgcagtaccaaagacatcctgaaaaaagtattagagtcatttattcttattaattgtgtggcctttggtcacgacaacgaaaaaaaataatctaatagcatttttagtctaaattttatcatttacctgtcagatttcctgcctagctcatttatatgctcattcttttagtggttcagctaagaagtatttgttgattgtcaattaccaggcagaccacgcccctggcatcaaaatgagacatgggtcatcaatcagagcaataaacacattagctcaggtgactcttgaacttgtggttcacagccagtgccccaagttgggtccagccacctgtgctcattaagccaattaaaagacccaaattaaaaacagaaagctgaaaaaggagatttatttggtgtagccataccagaaagggatatgaagagacctgaaaaccccctgttgcgtgtctgtctctccctcctccttgctcgataatgtagcccctgaagacatacattctgctgctttggcctgagccaagtgtctgtccttttgtatggtgtcttagttggggtttctatcactgtgaagagacaccatgaccacagcaactcttataaaggaaagcaactcattgggcctggcttacaatttcagaggtttagcctgttatcatcatgacaggtggcttgtaggcaggcatgttgctgaagaaggagctgagaggtctacatcttgatctataggcaacaggaagtgaaccgagtaccacactgggcacagcttgagcatataagacatcaaagcccgcctccacattgacacacttcctccaacaaggccacacccactccaaaaaggccacacctactccaataagccacacctcctaatagtgccactctgtgtgggggccattttctttctaaccacaacctatgggaccctgattattactctgacttaactcattttaggtctaagcaaaaatgggtatctttcttgaactcagtgtaggagaatttgcctgaggaagtagtgagaagaactcaccgtcaggtgcatgcacccaccacaaggttgctatgtctcacattgcacaggggtgttagctgctgctgttcagaagggctgaggttctttgccccgttgtgaagggttttgtgttgaagcattcagctgctgttcacggtttatagctaacaataaacctttaacgctagccacttttacatcctcatataaaatcctccagtgctttctatgtgccaagccccatgagttcttcaaggccattatctgggttcaccctgggtaactctcatgggtcagaggtcagaggtcagaggctgagttagagcaagtcttctcagactggctgagaaagatctgagcaatgggtcctggcccttctgagagtgaagaagtcagtctttcagtgagatatggacaccccatcttttaaaagcattatccagggggctccaatatgaaatgcagcatttccccaaactttaaattcttaccgtgtgatcttttcctggagggatgtgtacaaatgtttccaaacacagggcaccacaatagatcaaaggaaagattccattcaagtccagtgagtgaaccagtgagtctgttgggtttacttactggagcttagtgaggggttcttacgggaatgtgggtgatcccaaacagctgtgtcactgaaaggcttgactccagcatggatgacaatgtccggatgccggacagatggcaccccctctttagctgacgtttccctgccgtgcattctagaacttgatgagactatacatagttgggaaacgcaggaagaagtgtatttactacccttctacccttcctaccctcccccacgagggaacatcaacaggcccaatcctgggggacagtcacacctgtcctgagtaagatggcaatggcctttatgctcagaggtcagagttccacagtggtgctttagcctggtgagccccaagtcagccttggggatctgatagagacacagatggtgagtccttggtccatggtggggctgggagagagagagattttccagcaagccacggactgcactgtttggatcaagggccttgagcagggctcccaatctttcccgcccaatggacacttagcaatctgtgaccagtcctgatgcctacctctcactctaggcactgatttaactgatgtgtgttataacctaggctttgggtttgttagaacttcccaggtgacagacagcagagtttgggacaagctaactgacctaactgtctgtgctcatgaagtgcagtttgaccctggagtatggtttgtaaagtctgccctgaactaccattcctcagcagcagccttgcactgtagacaaccagaccatgtcacacctgactgccagcacacatctgtgacatggtcccagggttatttagttcctaaatccttgcagatcatgttattattctgggtcttcttctcagtttgcagcccagtagtgttgatggttgactcaaggggttcatccatgctgaaagcatccctgatctgaaaatctaatctgaaatgacccaagaagtgacagcttttgagaagtgatatgacggcacaagtggaaaatcctgcacctgactttgtgtgatgggttgtagctaaaatgcaggtgtacttaaaatattgtataaaattacgtttggcctcaatggctaaggcacatatggaatataaatgaatgtcatgtctagacttgggtctcattctaaaagagctcattaaacgcctacactgaaatgcttaaaaaataaaatagttgcttttctattgctgtgaagggacaccgagaccaaggcaacctgtagaagaaagcatttaacttggagattcatggttccagagcattagagttcatgaccaggaggtggggaacatggccacaggcaggcgtgtgcatagcaatagccgagagcttacatgttgagcaataactactaggcagagagatgggaaggagagagacccaactataatggggcaagacttttggaacctcaagctgacccctgtgacacacctcctctaacaaggccaccagctaggaaccaagcattcaaacatatgagcccatggaagccatgcaatgtttaaaccgccacaccagcattttgaagaagggaaactcacctgtgttgaaacatgtaaggattgaatggaggagctggccaccacatagtgtgctgtggccccatttttccagagtgtaggacagcaggggagacagcagctgtagatgtctcctgcttaggtcagtgcagaggatgctgggtgctaaagtagaggcttttctggttatttggacaagggttaggtgctggccattctagatattgaaactcagtgtgtattttatctacctttatgaatgagcaatgttgttggtcttttactctttgctttttgggctcttggggaggggcttgctacccagctcccccagaaaatcacacagagatatttttcttataactgcccagccttactttggcttgtttcttgccagcttttcttaaataatcccacctaccgttttccctctgggcttttatcttcccttcttccgtatatcttaccgtcttactccttggctgaccgtgtggctgagtggctgtcccctgacgtccttctctccttctagtttgcttcttctttttgtatgctcttcctgaaagccactcctgtctttctactgcctcactgttcagctctttattagaccatcaggcgttttagacaggcaaaaaatcatggcttccgacttaaacaaatgcagaataaacagaagccacacgcctttacaccattaaacaaatgctctacagcataaacaaaagcaacacggcttaagataatattccacagcagagcaagaaccttgacgatgagtttccctgaggcgtttagcgtcttgtgttctctttgactctaaaatgtttactttgggttgtatgacatatttatgtcttagctttaggctgaatactaagtgaaaagcctttttattttaatggcaccatgcactcttgttgaagaaataattggattaagagatgaggtgtggagaaggggccgtctgagtggaaccgagctctaggcgccctctccagcatctgccatggcgtctacacagataatttttgttactcgtgactcaaaacatggtcaaatgtgtgactgttgctcttggaggacacagggtgtgagtcctgtgaactcctggttgaaatcacctgccaaccttccagtcagcacacaagcttgtgtgtgtgtttggtagacaccttgattcttcacacaacaaatagtttctttctttcctttttattttattttgtttttaggctggagagatggttcagcggttaagagttcatactgctcttttagaggccctgagttcacttcccagtacccacatagggtggctcacaacctcctgtaactccagctccaggggatccgatgcccccttctggcctctatggacactgcatttaactatgtacacagaatttaaagttttgaaatttaagttagcatacacagtgatggcttcatgatggcgtcttcctgtacatgtcaccagactttgtttgtattcgcctccccaactccactcctttccctgtcaccctggcaattgttttaatcttcttacttagagcccagagtcggtgcttccgaattaaatagcaagaccagaacaaaacccagaaatctgagaagtgtcactaagagaacatggtgtgaagtctgagttagaacctgagcagctgcctgctcagcctcatattggggatgtgcctgtcgggctgctctgaaccacttatctatttaactgctctaggtttgccctcaatgggtacagcagccccatgatttaggggctgtcagtacatttaggttggtagctgtctggggacagaataaactagttactgctgaccgcacccccagtgcaccagtgaggtcttagaatttgcattttgacaaggttcctggtgacactgatggcccaggaagtgatggccgtgggctccagagaagtctgaatctaagaattttcatattccagacaagatcctgagacggttactagtctatgacatttactgttcacaccacacatggatctgctgaatatgtcaatatgcaaagggtgctaattaaacatattattgtctgtgtgtgtaggtcagaggtcagctttgtagagtgggttcttgccttccatcttcagtgggttctgggattgaactcatgtcctcatagttgcgtagcaagcccctttggcctctgagccctcttgccagcctgatggggggaatgtccttctgtatatatgtttttcttactggttgatgaataaaacactgattggtcagggaggaaatataagcagggctaccagacaaggagaattctggggaagaggaaggcagagaggagccaccagggagacaccacatcgtagccgccaaaggagtaacaggtctgggccttctctggtaagataagaccatatagaaatgcatagattaatcgttacaggttagtaattaagagagagctagccaaataaatgcacaagcaatatatcaccacataagccctccatgcctttttatatcatttgcttttaggaactcctatgtgcggctaaggcatttgtgcaccaatacttgggtaacgagcaccagcatccccatcgacacggaggaagagaggcccgtcatgctgaaagtaagtgtgccccgactggttcacctgctgtgcacacgggactgagagtgactgacagtccgtcttgcagggtgctagaactggttgcagctgatttcgtgggagtgaacatctgccagttggttaggtctctgacttgggtggctgcagcagggctgttggaggagggtgggtttgcagacatcaaaaaggtgcaggaggattccaggggcaccttctctgcttggaagtatctgggactgagggacatcgtgtgaaagaaaccctctttgggggctcttcaagaacagggaaggaaagccgggcggtggtggcgcacacctttaatcccagcactcaggaggcagaggcaggcggatctctgtgagtttgagaccagcctggtctacaagatctagttccaggtcagcctgctgaaattacatagccacagagaaaccctgtcttgaaaaaaccttaaaaaaaaagagcagggcaggaattgggcacggaaagccatcgtgtccccgaagcccttcattgtggatggtgttttctggagtttctctgtcttgtccacacccaccccagtggatcttactctgaggactacggtctctagagactgttgctgtttaatggaaacacatattgcagattggaacctgccagactaaggaggacaaagaagcctttgccattgtgtgcgtcccactgtccgaggtccgagacttagacttcgccaatgatgccaacaaagtgctggcaaccacggtcaaaaaactggagaatggcagcatcactcagaatgagaggaggtgagtggaaccaaatgtgacgttgaatcattgagagtcaaccgttggcctgggtgtgggggtgcaggctcacaggttctgtaactgtaggttgaagggacatggcgccctcctctggcctccagaggcactgcacacacatgcacacacacagatacacacacctaaataaaaataaaaaataaaaataaactaaaaatgtcagatggaatacttacttttcccattttatcttggctcaaaaatagatgattttagtttctctctgctctatttttgaaagctttttaaagactcacaggaccatacttgatttggtgtttagatggagagttttatatttcctggattcatgacatattttgcatgtaattaccatgtaatttttttgaaagtgtattctctgcttgtgtcactcagagaaactggaccatcgattggttattcatttatttataaatatgcgagaaatggccatttgtaatagagatcattgtctccacctcgtgccctaagccttcacacagcccttcagtagctattcccatcctgcctaaagcaatgggggttaaactccacctggtaaaattacatgaatcataagtgggggatccagtcatgtgatcgacagttgggtgctcccaggacctcagagcaaagacgtctgccctcttccctcttcatgacctgctgcagactttgatcaataaggagccatttgccacgtgcattccagctgtcacctgcagccatcgaaatggcaagccccccaccaaacggcccagacagaaatgcatggcaaatgtagttgttgttttgtttctaactcttaattctttgctcttttgggggggctgacacccagctcccagataagcagtacatggcgttttattcttacttatgaatggctggccttggcttggcttttttctagccagtttttgttaaactaccttaaattaacccattcaccttttgcctctgggctttgtcctttccccatttttgtgtatcttcctttacttcttactccatgtgtggccggctcctcaagttcttctctcctccatttcttgtttctcaatctgccctcccagatttctcctcctatttattctctctgcctgacagccctgcctatcctttctcctgcctagctattggccgttcagctctttattagaccaatcagatgttttagacaggcaaagtaacacagcttcacagagttaaacaaatgcaaaataaaagaatgcagtccatctttgtgtaattgaacaaatgtcccacagcatagacaaatgtaacacatcttaaaataatattccacagcaggcaaagtcagagaagggagcactgtggctcactggtgtccattccccagctgggcgttctggaacatctatctgttcaatagaatccccagaacagaagggcagaaatgtccagccttgtctacgcacccccaactgaaagccgtcatgtttgctgtagttgaaggatgatatgattgttctgtgctcacacaatgggatagcacatagccagggtcaggaatgaactagaccatgtgtgatggtgtacatgactctgacaagttttggattgagtaagaaggaaacaggatggataaacccaccattacactctgagagtgttctgtcactaaatgtatacattctggagacctttacacacagcccatacaataaagtcaaacattgtcagtgtgctgacagtcaaacggttctcagcctcctctctgtccttactactgcttttcctgtggggagcctgcatttgacaactgcctttagacatctgccctgtggtggccaacaaaccaaggccagaagcagaaaccggccactcgtatggcctcatgtgattagagaccagggccagctcacaacagaaatgttccagtgtgcagatggggtgtttccctcttttgcctcctcttgatgaatccgtttctgtctgtctgtctcctgcattcacagaaagttacacacttctctacgaggtctcctttggtaaactccaagtatctattgagtgctgggcctctctgggtgcttctctctccagggccttctcccccagtgcttgttgggggggactcagcccctctggatatgtcttaggaggacagtggattaggatgacccttgaccctatttttattttttatatcccctgcctctttctctcttcactgctttagtggagaataacagcaaggagactatgcctgagaactgggaagttacatttgctgatccacccttcatcctgatgcagtccgtgctgcagagtggtgaaggggctcttagtctctcagctttagaatttaatagaaaattctttctgagaatgactggcagccttgacacccttccctctcccccatggagagtgaagttattattagctattctttttattcaaaaccaaggtcaaagggagggtttgagaacattgcagacctgcctctgaatgcctgtgatgttggattcccccccccccacacacacaccgtgctatcctttagttgacccaggaagggactctggatgcaactcctgccaggctcagcatcctcagctttcgatgttttcatttgaattttctgtttgtattctacatgactgcaccaagtaagcagagcattagaagtgtgtgccccactcatgacgagggagggccatgaggtgtcagctgctacctggagcctgggaaggcactgagtgcaagtcttacagtctctgtaccacacaggctgcacttctgaaggacctggtttgtccacagagggtccgttgtcacagctgtacacacatgtagctaattccgtgagactgagctcttgttatgtgccaggtgctggccacacagactgtgctccaagtagctgcaaaagccaaggtcattgggctcttgtctaaatgcagctaggggctggggacaaggctcaatggcagagtgtttattcagccagccccacgccatgcgacacttgctgccaaacccagcaccttaagaagaccgccatgccttcaggcaacaaacagagctcaagggctcttaaaactcgtcatatgaattatggtgcccctcccccttcctgccttctttacccccttcttctacctctcctcctctccctccttgtcttcctcttttactccttcctttcctctgcccttcttccttctctctctcatctcctctccccagtcctcccttcctttctctttggaggccaggtctcatatataacccagcgtgtccttgaactctctatgtagccaacaatgccctcgaactctttaacttctcttttgtaatctgcttttaaaaatctctgtacgctattgtctgtatcctttggatactgtcttataattgctaattttcttataacctggacttttattagatgattttatatacactttttaatgctcagatttctgctggttctttgcctacccatttagtcttcattcatatctactatttaaaattatatatacgtatgtatatatacatatccatatatatataagtggtaagatatatatatatatatatatatttatatatatatagtagtaagttctttatctgttgaggactgacaacacactcatttaaatgtcatttaggaatggcttcattgcttggatcttattggcgatgaatatcagccttctgatttttagccccgatgttggctgtctttcctaatattggttttctgagtgttttggaatttaattacgcgggcttacctccgctggaacattatggctttttctctctgtgctcattcgttttctgtctgctggcgtggcctccagctgcctcctctcggccagcccgcagcgaggggtcagtgtggagggtgcgtgagtcgtggttatcgcagctgggacagcagctccatcagtgtctcctgtcccttgtgcaccgcctggctgcagcccgtgcagggacgttggaggctttctgcaagggggaccttctccatcagtgccttctgcaactgcagctgggcccatccttccagcagggctgcatcatccttacgcttggctgagttgggccggccttttatatttccctttaaatacggaatgtatgtcttacctaacttcgctaaacccgacaggaagtctgttgcctggcttttcttaggggcgtgtgaggagatgcacctcagatagggaacctatgtcagaccaaaacgcgtctcacctggagcgctaataacaggaacatgggtgaggggtgacttacaggatcgcggatgactcaagaggcggctgcacccctgacagctgccccagcagggacggtgacgcctggcagcccatgggccccagagcctctctccccagcctcccccacggtctgtcctagaacccggggcagcagtcttagccctgcaggcctcagcctcccaggttttgtttttcttcctcagtctcatgagcctctctcctccctccagagtagcatgtttgaatttggaggaattgctttaaagtaagtcacagagaaaatcaattattagataaaagttagcaagatggcatgtgttacagggtgataaccattaacagagaattgaagtttgagtttagctgacaacagccagcaggtgattttattgttgtttgctttttttttttttcttggcacatgagtaaacaagtaaagaggaagcttggtgtcttgctaccaacctcatcataaccagaggcacctctgtatgtagacagaagtttccgtgctgcctggtcctgcagccagccgttctgtcccaaataaacacaaagaggccaatattaattataaactgtttggcctacttctcaggcttattaccagctagctcttttgtcttaaactcacccataattatttttttttaaagatgacaaatttccaagatgtcagaatattttttttttttagattttatttatttattatgtatacagtgctctgcctacattcacacctgcaggacagaagagggcaccagatctcattatagagggtcacgagctgttacgataaatctttccaccaaaagccgcctgagccccaccgccacttgtgagctttacgccagccgcctgcccgagttagttccaaatgaatacacagaaacttgtattaggttcaaagctgcttggccaatgactaggattcttcatctgttagcttagtcttaactatcataaacctatatattttataagactatcttatcggacgccttttataggcgtccctccttgccggtggatcacatcctgccactggagcaggagcggaggggaaaagagggctcttcctgtttctccttctttaaatatgagtctccttgctatgtcacttcctgcctggatcaccacttctctactacatttcccagaatcctctttgactcctagttccgtctaacttgctgtctcattggccaaacagtattttatttaacaatcaataagataaacatacacagtagtacattccccatcaacgagcccaccatgtgggtgctgggaattgaactcaggacctctggaagagcagccactagctcttaacctctgagccatctctccagccctcacccataattcttatctatgtttagccacatggtgatttggtaccttttctcagtaaggcattctcatcttgttttctctgggtctggctggtgactgtgtctctgcttttcctcttcccagaattctcctagtctggtagcctcacctatacttcctgcctggctacttgccgatcagtgttttattaaatatgagtgacaaatctttactttgtacaagagcattgtcccacatcatctgtatattaggaataatgcatagtgacactccatcaagacttaatattcttgggctggagagatggttcagtggttaaaagcatttgctgttctcccaaaggacagaggttcagttcccagcacccacatggcatctcataaccatttgtaactccagctccagggaatgctccaggggatctgatgccctcttctggcctccttgggctaaacacccattttatatgtttcattttatatgataaaatgaaaagtaagaaaaattaacattctactcgccccatcaacagttaccattttaaagagtaatccagagtcacgacacaactggaccttttgttgtttgtgtctaaacacctaattccagttgtggagtcaacaagagaaaatgtgttgaagctaaatgttctctgagcagccatcagtgagattctgtctcactttagcccgctgacattacctggcgtcagaggtttgctttgacaataatatttgggagacattaaatcacagttgtgccgtcttccgtgcccatttgttcttgagactcataggatttttatttaataaccatttgcaatatttgattagaattggaatcagagtggagggcagggggaactggataggaaatgtcaaaattaagtagcaattacattagatattacattttgttgattatgttttcttaaaagtagtttaactttcttagtgtttcacttctcagacttaatttccgatagttcagaactgtctcatcttttctctgtgataggtttgtgactaagttgttggaagacctcatcttctttgtggctgacgtgactaacaacggacaggatgttctggatgtggtcatcaccaagccaaaccgggaacggcagaaactaatgagggaacaaaacatcctggcacaggtgagttgctttgagaaccaaatttgcctatttttttgttttgagttacagtgtcagttatgccttgctgcataacaaatgacacctagacacttatttcagtttctatgagctttaaatgtaagagcagtgtctgaggggcatcctcagagggactgtcagtgtgttatgtagggctaccgtcctctcaagacagaatgagaggaggtccacttcctagatggcttgtagagttaggtgcaagtctgcctcaggatacagcatttcctctggtgatggttgtgttagctttctgtgacaatggttgtgttagcttcctgtgatgatggctgtgttagcttcctgtgatgatggttgtgttagcttccagtgatggttgtgttagctgaagtttgatggcttgagaatcaccgagagacgggctgctgagcctataaggaattaccctgactatgctagttgactcattaggaagactcattaactgtaggccagcccaccctctgggtggagatcccagacagcagagaatggagaaagatctgagcatgcattgggtgctctctgtgcttggctgtggacagtgacagcagctgctgggagctcctgctttgctttcctctctgtgatgagcttcagcctcacaccaagacatttcccttaaaagcaacggattccagagaagagagagggcacctagacatagccatagtgtaggaaaaaagggccagccaaagacacacactctgagcagagccaaagaaacacactttggtcctgcaaccagagccaaaaaaaaaaaaaaaaaaaaaaaaaaaaaaaaaaaaaaaaatgaccctgaaaccagtgcccaagaaacacactttgtccctggaatcagaaccagtgaaagaaatacaccctggccctaaaattagagccaaaaggctaaaaggaccagtgaaagaaatacactttggccctgaaaccagagccaaatatgaccctgaacccgagcagaaaaccaaccaatccctgagcatgagatctaggcaatttgagctcagggactgaaatctgaccaatcctcaccctgaaagtcttcttcctggaaaactccacccctaagaagccctgtataaatcctgtgcctgttcagcatgtggctgtttgggctgcccgactgtcctcttccactctgacacaggcggccactctcctggattcttccctcccaataaatctcgtgaatgaggtttcggtgagactgtaacactcagttttccttggctccagagtgccagaatacctttccatcagagccgtaatgcttatacatagtctttaaaacatcaccatagatcccatatccatcagttctgtgtgactggttagaagcagagagagaatcccacagggacatggtcggcagaagttagggaccatttgaggctagcttagaggtacccaccacacatctccaaaataccggtgtggtcagagcatcttaagaaacaaattcccaggtgactttggaactgttctacctgcttccatctgctctaggaagacagcagtccagtccagatctctgaagtgcatgacacactagtaaattaacctgctttccagtgacctgcatggacatccctgtagtcacatctttttattgttttatttgctacttaaaacaattagcttctgtatcaaccacatatggataattgaaaacacaaaaatgacattagtttataattaacattaactgctgggtgatggtggcgcacgcctttaatcccagcacttgggaggcagagtcaggtggatctttgtgagttggaggccagcctggtctccagagcgagtgccagtacaggctccaaagctacacagagaaaccctgtctcaaaaaaccaaaaaannnnnnnnnnnnnnnnnnnnnnnnnnnnnnnnnnaaaaaaaaaaaaaccaacaacaaaaaaaaaactaacatactgtgctgagctggggaaggaaaaactgaagacccgttgtcagctagtatctatagactgtctgaagacagtgcttttcagaaataaagtctcaggtcttgttagactcccggaaaactcaagtatccagggtcccaggccacgtcttccgtcaccccaatcaccaggcggattcgagagcttgctgcaaactgcatgaggctttattgtaatttaacgagctacccccatgttagcccaggccttccatccccccgccatggcggatggctagcaaagacagtttgaagccgctgcgcacagatcttatagggcagggtggggggcatgtctaggggtacgcacaggctcaggattggtgtgcctccaggcttggagggtttgccctgtgttgattggtcaactggttgttatggctcttaggccctcccagggtggttgctatgctctctgcgtcattgctgtgtgcttgtccgtaaagctcacccagggtcgtaaagcacagcaccaccagctaacttctgattgtttccttgtcacgaggcaggcatctgactttctagtgtctaggacaaggtcatagaagcacgtgttcggctgttatggctgccaaaagggaagctggtcccttcagtctcagggacaaagtctttctgccatctataacgatatatctttccaccagctgcctgggttctgccaccgccttagagcccctgaataacacacagagtcttatatcagttacgttgctgctggacaatgactaggatttatttgttagctcagtcttaattaccaaccataactaccaatctatatgtttttataaggacttatcttacccagaactccagccttatgtgtcctctcttcctgggatcacatggagactctctccctttcctacatttcccagaatcctcctcctctcctagtcctgcctaacttgcttccctattggccaacagtgctttatttatcaaccaatagggcaaacacgtacacaggacaccctcattagtcatcagtgaattatttttagaaagcatttgatttcagggacttttaggactttgagtgaattatgagatattaactgatgtctccaacctttttatctcatgatacaaatataaaattcaaggttcagggaacatcaaattcttcttttcaaaaataatttttatttttaagaacttcacacataaacaccaactgcatttatcacatctgcaccaccctccccccctaacttctctgtcctccaaattcatgatgtccccttattgtaattattattatatgtacacgcacacacatgcatgtgtacatacaagggactgagtccgtttagccttctcatttgtgcccagtactggctgtgggaggcacaccgaggacactctcctaggacactgtcctctgcttctggcgcctacagtcttcccatctcttactcctccacgactttcaagacttagaggttggagacctgtgcagatggattgatagacttgggcccccagggctttagtctctgaattttgaccagttgtagatctctgtggcagtctccacctgttgcaaaaaagactctttgagaacaccaaaggctcaaagaaaaccacagtgtcttagttcatgaactccacgggacagttcctttccattttgaattcttatttcgaggctcattgtcttgatctcatgttcctcacagagaactaagcctgctggctcctcaccagaaggcaagaatttggctccctgggaatgggggaggggctgagggagtggggatgcaggggtggttccttgttaagacttcagtgtggatgcattcattcccatggccacttatctgcgttctgtgaacagtggacaaaccctctgagaaagttttgtgtatttaggatctctgttattgggggcatatgtatttggaattatttccttttgcctaaaaggaggtaagagtgacatttggaagtcattacctgttgtaagtttcaggtaaaaagttaacattttttaatattattttgattttggaaagttatagaaaaataacagaataataaaagcatatagaaaatatattttaattcgtgtgaatatatccatgtagcttgatacaaacaccttcatatttcctatcttaataaaatacggtttctaaataaaattaatcatgccattgatatagtggacttgttgactgggtgctctcgtgagcagagagtttttggttcgacagtgttttatttattattcaggactaacagccagttaagtaccttctgcctttgcactaatttcacttacacatttctacagtgcttttaagtccgtgttatttgttaaaaatgcgaaaaggttgcagagtgcacacgcgtgtccataaaacagaaggatcttcttcttctaggtgtttgggatccttaaagcgcctttcaaggagaaggcgggagagggctcgatgctgaggctggaggacctgggcgaccagcgctatgccccctacaagtacgtgctgcgcctctgctaccgcgtcctgcggcattcccagcaggactaccgcaagaaccaggtgggtagggagcccgcgccctggtgttggtggctgttaaagtatagaccgaggagtcagaactcgaactttgcaaagaagggctttatgtgggcggctcagagaaccgtccgtgagggctgttgagccggacaggagtttgacttgcaggcggggatgctgcgcttctgggcatggtcccggagggctcctgctgagcagggtaccctggcctgtgcctgggaggtgcagccttgctgtgtgcctgcatacctactaagataccatctgtggccaagattcaacctgcacctgaaacaggaggagggactgaggggaggagggatgggatgggggcagaggaatgcgatgctcgacgctcaggctggcgagcttgagtggtgggggctgggagccgtcttcatgaccgtatggaacatgcattttagggagacaggataatcggtttggttacttttcttccctgtgaccataaattatcgacaagaagaaactcaagggagcgagggcttatttggacccacatttgaaggtgtccagactgtcatggaggggaaggcacagggcgacccctcgcctcttggaagacaggaagcgagagcaaacaggaagttgggttataaaacccgcaaggcctatccccagtgacccacttcctcccggaggctctaccgggaggctcagacttccacaactcctacccctgctggggaccacgtgttctgatgcatctgcgcatgcaacagggttaggacatcaacaaggtcgccgtggtcatagggcagcctgaactgtggaggagagtgggcggcttgtgtgggtccagggatggagccaaaagctgtaatctgctagtgaaagttatttcgagtctcactttgtcttacaaatatgtagagagtctagagagatgtttcggtggttaagagcactggcttctcttctacaggacctggggtcaattatcagcacctacaaggcagctcgtgtccaatgtcccttccttctggcctctgttggcacttcaattatcagtgcttacaaggcagctcgtgtccaatgtcccttccttctggcctctgttggcactacaggcacatgggtgtacatacatacatacatacatacatatatgcaaagtgcataacacaacatacaggtcatctttaaaaaatctgtaatatttgcattgggttcaataatgcaaatgttgacataaagatatttatattattgatgacctggcattgtgttctccgtgtgcttcttatccagtagaaggatctgtatcactggtgtctaacattttttttttttttttttttccgagacaagagtttctctgtgtaatcctggctgtcctggaacttgctctgtagatcaggctggcctcgatctcagagctctgcctgcttctgcctcctgagtgctgggattaaaggcacgagctatcagttgctgagtttagttcatgagggagtatggcctgagagaaggctgggaggcagggcctgaggcacagagctcaaggccactgatgaggaggttcaaggcaagtgggcaacactcaactttcactcactttgtttcaagcctaacagttttcacaaatccactgagaccaagaagccaagcaggatgctcagacttacagtgtttttgttttctttctttttttttttttttggcattgggaaacaaacttgtcaccaggtgggcactatgacttagctgcaccctcagctgccaggctatggttttaagaatggatccagtgtgtaaacccaggttctgagtcatcgttgagagtttggaagtattttggcaagaaaacaaatttttgttttttccttcaggaagaatgtgttaaaatatgttggctttggaattcagctttcgagatttgaaaagaatatgtaaagcagattagttagacaataagtaaatctgttaggtaacaggaacaaactgacagtttaagcaggcccttacacataccatgtatttagatccatgtcatacaatatataatacaatgagcatctctcataccctccgggtgaggaacctagttctttgtggttgaaatgtggcttcgggggtcacactaatagtttcactacattccagtgggatgacagtgtagagagtaatgttcctgtctccccgggaaagggcatagatccagaatgctgaaacagacattaggcattggggttgtggcactggagacagtcctgtgcagcacccgactgtctgagcacagggtcggttggagaggcagctcagcgggtttcatgcctccccacttctcttcctgggtcccctgaatgagttacttttcttgtagctgtgatcaaagcctgtcaaggagccacgggaaggagaagttgtttatctgggctcagtttaagggcatcatgacaaggatggccgggtggcagcagcataagacagtggtttgctcacatctggcacctggtgttcagagtacagggtggggtcaccctgaaaacacccatcttcctgtcaagcagacacatttgaacatgtgcatatatgcgtgcgcgtgttgcacacacacacacacacacacacacacacacacacacacacacatgcctgggttgatatttacgcactctctagattccttgcagtgtgtcactgtgggtcatctatacctccccttccctccccagagctaagtcactgatctgaccaaagagcaaggtctccttggtgctcactgttcctgcagaatctcattgactctaagctatgtctggacccccttttttctgttctgttgaattaagtgtgtttgcattttctcagacccaaatgggggtacccctatcatccccaaagaccaagggaccatttcagaagagatgatgggaggattgtaacagttggaggccagggtaggagccctgtgaaatgctgtcttctggatatggcatgacgtgacacgatgtggtgttcacctgcacacagtagctgtgttatctgcatacggcctgcacacacaacaagacggggctaatcgggaggaagaagaggggtctgcaggggcgagcagcaaattagggaggccgatgaagcacagacatggtcacaatatccttcatacgtgtgtgaaactctcaaaagagctgaggatgcttggcattgagccagaagcagtgtaagatggtcttctctcaagagtgacccgtgtgaggtcactgaggagagttacctcaggcgtgtctgggagggtgtgtccaggtcttcaattgaagatgcaggatcttgccagtgggcggcaccacctgtctcatgggctggtaataaaaagagaaagtgagccgagccccgccccccccaactgagtgcaatgaggccaccttccctcccttgccctggcttccctccctcagtgaactgtatcccttgagctgtgagccacagtaagctttccccctaactgctgtaagtagcttgtgggaaaatattttaaaatgtagataaccaaagcaaattttagaattcctattgtccccacctgcatttcagacaccagtaaagagctcatgtgtgatttagtgctggcccaggtatttaacgttgtgtttgggtttactattatttagagaacccaatatcacctctaatttcatgtaattattcatcagcatcttggaagcttgcctcacactacagtacgaccccgatggccataaacgcgtgtaaatcaatatatagctctaaagtgacacactgcagaggacttttactttagttaattgactacccaatagcaaggcatcattccgaaagaccacaaaaaaatgatgctggcgttataattagatttgtgtaaccaatatcattttcaaggactaggtatgttccggtaaattttgctcaaggcaaaagccactttctaatcgatggattttctcatctgagaaacagaggtgcattcccaaggagaaaccccgagaaatagaaaacctttggtcattgaaatagaaaaccttagtgctaagggtctatctatacacagaatgagaaaaccagtgattgtggtttgggatataggagtgagaatgaagggtgagggaacaggctggagagacgacggctcagccagtcagagcactgactgctcttctacagggcctgggttcagttcccagcacccacacaggggctcacaactgcctgtaactccagttccaggatatctgacgccctcttctggcttctttgggcattgcatgcatgtggtgcacagactcacacgtatgcacacaaataataaatattaaaaaaaagaacagggagaagactaaatagtgcataactgaaactccccatagtgttctgtctctcacggttacaataacattttgcccggcgttggtggtgcatgcctttaatcccagcactcgggaggcagaggcaggaggatctctgtgagttcgaggccagcctggtttacagagcgagtgccaggatagcctccaaagccacagagaaaccctgtctcaaaaaactaaaaaaaattatatatatatatgtccacagttttctctaccacagggcctttgtgggtgccactccgttgcttggcaagcctctcctggcgctcccaaggttgctgtccttacctccttttcatccttgctcacacattgcttttttttctgcctccctcgtctccatccttggtttcatgtcgctcatccacgtgtgaaagcatgtctgtcttctcatttgctctcttttatctcatagcgtgatccccagagcttttgacgccatcatgaaacagttattgcatggctgaatctaattaataattcgagttaccatgtgatcctatttgattgctccttactgataagtatgtcaagtttttgctgtcacttatcagagaagatcttgttggtcattctagtgtcaatctgaggaaaacaaacaaacaagacaactggagcccatgtagggcattcaaacaatggctgcaccgatctcaagtcccaggagtacggcagtcacatacattttaaaaattattattattgtttattatttatagttataacttctggtgagagtcagagaggctccttgcaggctggtgaaattctaagttaccatgacgttaaaaactatagttagatttccttttctcacttacaagggtgtcagtacccatttagaaaatagtgattagtgacatgacttttaattaattaattagttagttatttgaagtattgaggatggaaccttgacccttgcacatgccaggtgagtgacctctcccaaagctctgccccagccctcggtcacagtttgagttacctgactgtggatacctttacttccctccaggaattctctttactgaggcgttatttacttgtttttcttctgacaagcttcggctgggttgtccggtggctcaggtgatcctggctgctgccccccagggagctgcgcttgcaggcagtgtgctccacaggttctgatgcctcctcctccctacaggaatacatcgctaagaacttctgcgttatgcagtcccagattggctatgatattctggccgaagatacgatcacagccttgttacacaacaaccgaaaactactggagaagcacattactgcaaaagaaattgagaccttcgtcaacctgctcaggaggaaccgggagcccaggtctgtgctctgggggatggaagaatggggtttttgttttgtttctttaagataaaaaaggtgagcatctattgtagcactgactcttggtgggcagacgaagcgtttatttccatgataacggtgtgtgtaaagcagttctgcttctcaggtgatcagcatcctttagagacactgttgatgtgtctccttggtgctggggagccaacctaaggctcacactggctagaaaagtgattggctgctgtacagcaccccagccctagactggcatttaaatgtactcatttacttctattcggttttccaaaatacattcatgtattttcacacctgtaatcccagcttctcaggaggctgagacaggaggattacaaggctagaaatggggttatgacagtgagtttaagaacagctagtagggccctgtcacagttgaggagttagcccagtgggagaatgtggggctcaaggactaatccccagtaatgcaagaagaagccagaagcccaaaatgtgttcacatagactcactcaggtgcccagattgcagatgtgggccacatgtgtcctaggagagatgaatgatgactgacacatttatgggccatggcaccgtgttgtggtgtctaaaggttgggcactcctgatggggcacttcatttaataatatacagtgcattctgactgctacctagattttaataaaatcaagcaaatgacttattatctatttcttttttggtgctgggaactgaacctaggggtgttcagttttattttcctttatttttcctctcacaattgtaggcctagctagcctagaactcactgtatagccggggttgactttccctctaaggcaatcctcctgcttcagcctcccgagtgttgggatgataaaagtgaccacacatttggggttacccagcttctaccttcacttagaaggagaaatgaaagacaagcaattagaaagggggtgccgggtcataggggctacacattctctttcactccatgctgccttagatggcaacagtgaacacagaagccaagaacacccactgtgctttctctgtctagtcctctaacagtaaaatactaggtggacagcggcctcccctttgaccaaccatcctctcttgaagggtgctccctaaccctgtatatattctgaagtgtgctccccaaccctgtcagttgctacttggttttggagacactcagggaggatgagtcattgtgctgatggatgtgcatcacctaaaacacagaagcaaacgtaacccattctgaacaaggcttatacgtaacagaaagaattgtctattctgcttttaatggtgcaggagacgaacagcacacaggaaaacacggcactgaaacaatgttaaatttagcttcttttattcaattccaaattacatttttgttgcgacgattctatgaggatgctttgtcgtgctggcgagatgctgttgttagtgtgtggaagcctttgccagggaagcctgagggcccacgttctgtccccagatgtctggtagaagaggacagggacacttggcacactctgtgatagcagctgtcacactagcagctgtcacacagcaagatgggaggaggaggcaggacagtcagcgggaaatctgggccaggtcaacacagtccagcagaagcaggagaccttgcctcaagacggaaggacagaactgacccctgaaagttgacctctcacctccacgaataccatggcttgccagaacccatgtcctgacatgggcgctctttaaaaattaaaaaaacaaacaaacaaacttaaattgatgagtggaggcactcaagatgctctgcttgcaaacatgaaattgttggagagtcactaaaagacaatctgttgaaacataaaaatgaaatgctcttttttttttcacgtccactttcctcctcctaggtttctggactatctgtctgacctctgtgtgtccaacagcaccgccatccctgtcactcaggaactcatctgcaagttcatgctgagccccggcaatgcagacatcctcatccagacaaagtaagctgcccacggaggtgtctgttggacatccctcaccacacgtgtgtgctgcctcatagactttgtgtgtctttgtcttccaggctagtgtccatgcaagtggaaaaccccatggagagctccatccttcccgacgacattgaggacgaggaggtgtggctctactggattgacagcaacaaggagcctcatggcaaggccatcaggcacctcgcccaggaagccaaggaaggcaccaaagctgacctagaagttctgacctattacaggtactggggacacgcgcactctccatcaaatatctgaagggagctggcgtagtttgtcgtgcctgggaatcaagattcgctagacccagtacaggttaaaaaaggcttattcagagagagaacacaacactggaggcaggcggctgccgcaggttctggctccaagcatcctcccaggctctattctgtccccaggtcagcagccagagaggaaaaccaacctaaaacctcccctcctgtacatacctgtgaccactcccaaatgggtgtggtcagcgacacaggtgcatagttaggtctttcatcacaaggttctctcaaacctctaggaattagagacgaagaagagggcacttgaaaactcagaaagagaggaatggagacggtcagggccacctagagatctcagaatgaaagctaacacatgtttcctgcttgcactctctgatgagttggggacttgtcagtaaggcgtttcttcctgttacctatgggaagtcggggctggtgagaagcaataggaccttgactgtggactgagggggaggaggcactgggatgagacagacgtggccacaggggtggccctcacagacatggcaagatgggatcttgtgagcgtgtgctccttggcacttgacaggtgcaggtgcctgtagttctggaaggagacccgtgttgattagcaaaagcaggagaggtggttcccaggggtcagtgtgttgggatcaataactgagccagagggctggcaagaggtctcagccagtggaaatgcttgtcacataagtctgacgattctggaggcaccacacccccacttcaacagaggcaggggagggtggagagaggtggcttcatgtgacttactgtccattccaggcctggtgcactgggtgttagggctgaaatcctagccatgagaggggttgtagtaacagggacagtgttagacccgtgctgtcatctgctcatggccaaaagagtttggctcagtgtcgtaaggacttacaaacacatctgcacacccagcagctggctgtgttgtgctttgttgtggaggggccttaacggaggcaagagggataacgtaacatgtctcatcctttaggtaccagctaaacctcttcgcaaggatgtgcttggaccgccagtatctggccatcaaccagatttcaacacagctttccgtagacctgatccttcgctgtgtgtctgatgagagcctgccctttgacctccgagcctctttctgtcgactcatgctccacatgcacgttgaccgggatccccaggagtctgtggtgcctgtccgctacgcccggctctggaccgaaatccccacaaagatcacgattcatgagtatgtttggaaactattttttaaaaattatttgttttatgtgcattggtgttttgactgcatacatgtctgtgagggtgttgggtcccttggaactggaggtagagacggttgtgagccaccatgtgggtgctgggaattgaacccaggtcctctggaagagtagtcagtgctcttaaccactgagccatctctccagccccagttagttgtgatgaaacaccatgaccaaagtaacccggggaggaaagggtttatttgccttttgcttcccgtcatcttcaccgttgaaggaagtcaggataggaactcaagcagagtaggaacctggaggcaggagctgataaagaggccatggagggtgctgcttactggcttgctccccatggcttgttcagcctgattttttaaagaacccaggacccgggctcacagggatggctccacccacaggggcctgcccctcccccatctgtcactaattaagaaaatgccctacagtcttgcctatagatggatcttagggagacagttcctcagtcgaggctccctcctctccagtggctctagctggtgtcaagtttacataaaactgtccagtacattgtatttattacttttctcatagctgacaagaaacagctttattgtggtgcacagtttgagggaccagtcgtcatggcggggcctcgaggcagcgtcaccttgaatcttttctcaggggcagaaagatctcacttctgattttttcctctctatctagtaatggtttcaatcccagggaacggtgctctccacactcaaagtgggccttccctcttcagttaattggttctggaaatatcctcacagatgtgcccagaggtgtgttttctagaagattctagatcctgccaagttgacagtgaggatgagtgttccaaagtcagcagatgaaagccaagtcaaagtgactttaactttgaaaagaaaaacacaggaagggatttgcccatttctgttcacagtgttcacctgggaagggtcagtaagatgccctgtcttgagggcaaaatgatagctcctcagcaggaaacgtgttcccggaggctagtaaacaaaagtcctaacactcacagctgagtgtgtgacacctggcagactccaccgcacttgttccatctcagttggcagtggcccctgccacagacaggatgtgtaccccaagaagttgactgatgtgtccaaggcagagcactgtgggagtatgaatagataacatccccactgtgggtaaggcaaagcactctgggtgtcagaataggtaacatctctactgtgtgcaagggaaagcattctgggagtcagaatagataaaagccccactgtgtgcaaggcagtgcaccctgggagtcagatagataacacgcacacttctcattgtttctcatcagcttaactcactcttgtgtcatctgcccaggtatgactctaccacagactcctccagaaatgacatgaagaggaaatttgccctcacaatggaatttgttgaagaatatttgaaagaagttgtaaatcagccatttccttttggagacaaagagaaaaataaactgacatttgaggtatttaaaaattttaaatattttctttgtgcctggtgcccacaggtcagaaggggacatcaaatcccatggaaccagatgatggagagccatgtgggtgctgagaaccaaacccaggtcctctggaggagcagccagtgctctcagacactgagccgtctcccagccccacttgaggtgttttaaagaaatagtcactcctggcatgattgtgtgttcttgtcagaaatgagatgcattgaacaccatagattttccttccctctgatatttagggtatctaggccgttgaattgttaggttcaggcagatacaaatctgtctgatgatgacaaaaatatagatttggcatctatattaacttacttttgaaactatatatgatgtgtagaaatgcagttcatatgttaattagaccacaatcaagtgatgtgacactctttgaatcataagagaaaagcttcaagtcacataacgagtccctgtcccctgtacaaatttgaaaaaaaccccaccttttcttagtgagttaggtgacatatgtactcagtgactagtaatgccttgccccagttatactaatggacaatagaattacaaataaaagctcattttattttaattcttgtatgccttgataattaaaatgttctatctcaattatcaatttattatagctttccttgttttatttttctttcatatatgtaaattttgttgtacttggtaaacagtgacagttttagatactttgtatttagatgtccttcccccatcttcacgggaatgatgagttagcctcattgacatgaattgaaatttgaagacaatgtaatagcaaaaccagagagagaacactgtcacaccatacctggtgtgttagctgtccactgtcatgagagatctcacccccagtgtggcagcccaaagtaaacttcagttctgcgagtcacaagcctgggtatggtatggcggtgtctgttcagtcactactggaaatgcttgccatttctgcctcgctcaggtggatgctggtggctctgcttctgtgctggcttgtccacacacctcagctgtttgccacatggcttttctgtgggctgagtgttccatgagtgtacctggcttcccacagagtgagagcaagaaaaacgagagaaggagagagtgagagagtaaggaggggagagagtgagagggaagtagagagggggagagggagaggaagagagaaagggaagggaggggaaatagagagagtgagaaagggagagagaatacttaaatgcagtgtctaaccttggctaaccttgatatggcgcagcatttctgctgaggcacacgccaatctgacacatcgtgggaggacagctgacattggagccgtgtcttggaggctgcatctcacttaattatttctctagtaccaaggaggccacaggccaggataggggacataaaactctgggccaatttatggctcacatttattaaagtaatttaaccactgattaagtggtatcttcctgacttacattaattaagtagtagatattgtaacataaactccttaaatcacattaaggcctcttatgaatagaccctagatttggatcagtcaaaatctgaacagcagcctttacaggggttttaaatcctaggtattaaagaattagggacttagaaacaccagaaccactttagatgtaaaaattgcaagtgtttattccattttccaatgctgttctgtcctctgctcttcctgtgaaggtggtccacctggctcggaatctgatatactttggattctacagcttcagtgagctgctgcggctgacaaggaccctgctggccatcctagacatcgtccagacccccatgtcatcgtattttgaacgattaagcaaatttcaagatggaagtaagaacttttgagaaatgtgataatgtttttgttattaattaggggtgagataaaaaagcaaacatagagaagcaatccacacaggcactggctcttgatgggttacatgataacagggtgggcattcaagcagtttcctttaataatactggtgtgtgtgtgtgtgtgtgtgtgtgtgtgtgtgtaggtctgaagcggacttcagtcagtgtccattttgactgctgtctactttattaattgaggcaacatttcctgataaactcagagtgcactcatcccggctactctaggtattgccctagggagccccttgactctgcttccaggagtgctggggctgcacagctactgtgcctgcttggctttgccatgggttctggggatctgaaccatcagacttttggtagtgtccatataataaccatacattttttggaatggtgattacattcagatggaaagttgtttctaggagttataagggagtgtgtatgctggacataaccctgtgaggatgtcagaggaggaggcttgggcagatgagcagatgttcagtactgaactgagacctcaggtcagcacgagttgtctcacacggagataagagggtcagatatgtctttgtggcagtcattcattagcttctggcttcattgtggaagaaggtgtgagacaccggggaagctgggataccctgcccaggagtcatgttgagtgacacagtgctgaagctgtcggctgggggaagggcctctgcacggagcacagtaatggccacagtagtacccaggacataatggaaaaggaaaaccagatttccaagttcaggcataaagagggactgtctgtctgatcagtaatttcaaatgagggttttacagaaaagctgaaggaatgaattgctgttaccccaatctcagtctctttaacatagcacacgcacacgctcgcacgtgctcacacacacacacagagacacacagacacacagacacacacacagagacacacagacacagacacagacacacagacacacacacactgacacacacagacacacagacacacagacacacacacacacacacacacacacacacacacaaaacatttaagtccttcaccttcagggcagcttgagtccctagtccagcaaagacttagttactgcagcagaaacagtgatggtctgaacagttattctgagagctccaactactaggatctctagggaaaattttgtgtagcttttacatggacacatgtctctttactctgggagcaggcactgatgacagagcaaagggataatcctattcaaatctagctcagtgaccagtgagttactgtgttactaacaggagtatgtgtgactcaaaaacttacccagcatgggcagctcaggcaagctcacccctggagctcccttacaacttcctggcagccaggcagaatggagccatctcccccacccagcaattgcttattgcatctataacctcagtgagggggtttatggattatgtaaagtttcagaaacttcctgagtcttgtgtgtttcatttacttcctttgtcctatgagttttcctcctctctctgggagggagtgtctcaatttgggggaagcatgcacacactgtgactgtcctcataggctcaggtgtttgaacactggcttcacagttgttgtgtcactgaagaagaatcttgttggaggaagcaggttactaggagagagcactgacgtttatggccaggctccacttcctgtctgtggagacgtgagaagttggtgcatcacgtttctacctccatgacttctccaccatgacaggctgtgcctcttcaaactgtgagccaggaaaaatccttccttccttaaagaaataaaagggggttgtgtgataatcaccccagaaagtcgaaataccgagagagtcacatagatgagaacacatagagaggaagggacctaaaagttccgggtggaggcttgggagcttctagaacgagtaagtctggaagtggggagaaaggggacagacccttgagttttgtgtgcagagagaacaaggactacgtgagtctgagcagcgtcacgtggagagagagagagagaggggggggggagcatgtctgtgccccctccagagccacttaagagaagtgtgctgagcgagctaagcttccacttccaggccccagagcaggtgagcatgcccaagacccttgacgcttaagccagacaaaatcccagcatgcagagggaaggtgggcacaaagtttcactccgagctgagaagccatcgatcactgacagctgctgggagagggacaatcatgtttctttgagggtgtggtccttgctaagttattcatgctctggtggatgttcccatacccaagtctacgggagaggtacaaattgtacttaatgagttaggaaaaattaaaggacatgaagttgtgtgtgtgtgtgtgtgtgtgtgtgtgtgtgtgtggcagatcctggaggaatttgtgggagagagaagaatatgatcaaaaaacactgtacaaaattctcaaagaactaaaaaaaaacaaataaacaaaacccccaacaacaacaataacaacaacaaaacaacaaccaagccagtaaagaaaaagaattctcttagagactgggagctggccacagtgccctgtctcttactgtaaagggggcattcggatcctcacactcatccatctaacacagcttattggctgggctgtcagtcagggaaagaaatactgttttcaagcaagggcattggctcttggccctttgcctagcatcataccgtcattcgctgtctgtgatttaaaagcgctgacggtggaactgatcgtttggattgaagaattgtttcaggaggcactttttttttctttgtcacacatagaagtgacaaaaaacagaagaacttaatggccaacacatgggacgtctggggaattatttgcaagtggcacatttattaaattatacaattgttttctttttatagcaaaggaagtacaatccaaagattttgttgttttccttttcatgcatgcatagtgtatgcatatggtgtgtgtttgcatgtgtgcgtgtttgtgtatgtggtgtgtgtgcatacatgtgagtgcacacgtgtgtgcatacgtatgtgagcacatgtgtgtgttcgtacatgtgtgcgcacacatgtgcacacatctgggggtgtgcagcatgtggcggcccaaggttgacgctggggaccaccctccattactcttctatcacactccttgaggcaggtatctcagtcaaacccagagctaatcagtacggatacggatgttctcactagctagcttctctgtggttctctctgccctctgaggtggaattatacctgacttgtaagtatttgatcccagatcctcatagttctgcagaaagcactttaaccattgagctttctttccagtcccagacttgactttctcctgatgctaatgataaaggctgctccacaactgtgggtctcactgcacccacccttccctcccctcattctcctcctcctcctctttaaaaaaatcatattcacgcatacatgtgctgcgattaggtcaaccccaccctcgttccattccagccaactccttacctatctccccagtttatctctcctaacattacgtgtttcctctcttattttgtttgatctttgatgttatttttaattaaacatttaaaattactttgcttcactctcccctttccttcttccagtccttcccccacacctctactctcctcctcaaattgatggctccttttattattgttgttatatacatgcacaaatgcatgcatttgcaaatacaacctgcccagtctatttagactgtcctgggtatatacgatttcagggctgaccacttggttgttggataaccaattagaggcttcattcccaagagaagctaagttatgcctccctcagtggtcactagttgcctgtggttctttgtttaggagctggaccctgtgtgatttccttctgtgttagcatgtttattgatgttttcattgtttaggtcttgtttaggaagccatattgttgacgtatcatgggtgtagcttccttgtcgtttctacacaatttcacagtagacttcctggtcctctggcccttaaaatcttcctgctcccctcttccaagattcttcctaagcctttagggcaggagttgtgtggcagatatacccactgggaatggcaccccacaatcagttgacctttgcaatttgaccgtttgtgtttttctgtgatagtatctgcttgctgcgaagagaggtttctttgatgtggggtgagacctacacttatgtgtgggtataaagagttagaaatcatgctggtctagtcaaatggcggtggtaggttctcctctgagatgcatgatatcactagacctgggtagtgggctctgtttctggtagatgggcatgatttcactcccatcgagcagtccaattagacagctgttggttaactccaagataaggataccattattgcatctttagagattgtcttacttttctgttgtcatgagataacatcatgaccaccacaacttataaaaaggaagtatttaatttggggtttacagttccagagggttagaatacatgactgtcatgcccagggagcatgcaattgggccggcaggcgggcgtgggcctagagcagtacctgagagctcagagcttatgtctgatccacaaatactaggcagagggagctaacagggaggttgcagtcttttgaaaagtcaaagcctacgcccagtaacacacctcctccaacaaggccacacctcctaatccttccccaaacagtttcgctaactggggaccaagcattcagatacatgaacctgcggggccatttttatccagaccaccacaggggtattttgccttgctggtcactgttatgatttacaggtgtcacaactgagtaggaatattgattgctttgctcttttaacagtttgtacagcaccttctagttctatgaaagctaggctctaggaggcctttgtattagatacagcctgaatcttccaaatcctgtgtccaaagtgtgtggtgtcttcagcaatagagacctaggatcttcaacctaggatctgtgcaccacctgctgaggaacccgttctctacttttctcaagtttcccaaggaagtcagtacagggcagtttgcatctacaaagaatttttgctttaacttgaggtgattttattgtatcaaaagtttaaaacaaacaaggcattgttctgtttccagtggttgtctgtcttgtctcaggaacagtgttgtttctgaaccacagtgttttaatgttttggaactggtgctcctccccttcttacagtccctttaactctggtactctgctatcaatcaaaggcatcctcttaaatttcactttctgccctttctgtagctcttgccatttctagagaatgatgacgcagctgcttacagctgtgcccaaatgccatcatctcatgagttttacctcttgctgtttctgaaatattactacacagtctcctgccatctccagtgagctgcatctatacctcagataatgcagtcatgcatagcatgctgtgttcggcaaatatatatgtgatcacatgtaagactgtgcatgctgtttagccgcaggtatacatcaggctgtatcctgtaggtttgtgccggtaccctctgtgatggttgtcccacagcacagttgctaaggatcatgctgtcatcgataagccttgctgccctttcctgtcttgctcaccactagaacaaacatatgtgacatgccttttgtgagaagtgtgaatcagacagacaaaactttttagagaccctaacttacaaatacatgtctttatttgttaattaaaaaaatttctaatgactctttggtcttgaagattcaggtttattaagcaaagagaacaatagtgaaatgaaaagctatgagaattggttctgtttctgattttaaagctgacctgtatcaggtctagtgtactaacatatacttatttgttttatacaaatatttatttagaacagttcacttgactatacataaattgtatgctgtccctaaatatacatacatttgcatattaaaatagcattccaaatatgatttgtgaaaattattaaatgagaaggtaacttagtaaagtctttgtcatggaagcatgaagatcagaatccccagaatccatgtgtaaaggtcaggtcagacatagcaatgtgtagtgttatcccagctctgaggaagctgaggtagctgagtctctggggctcactagccatctaacccagcctaattggtgaaactccaggtcagtgagaaaccctgtctcaaaccaactaaccagccagctaaccaagtaaccagccagtcaaccaaataaccaggcaaccaactaaacaaccaaccagccaattaactaaccagtcagctaaccaaccaaccaaccaaccaaccaaccaaatagctaaccaatcaaccagctaaacaaccaagcaactaaccaaacaaccaaccaaacaattaatcaaccaaccaatcaaccaaccaactaaccaaccaaccaactaaccagctaaccagccaaccaaccaactaaccaactaactagccaaccaaccaaacaaccaccaacaaaaagctggatagtacctgagaatgacacttgaggttgacctctggtttctataagtacacaaatatgtacagacttgcacacatatgtgcacctgaatggacagacacactttcacacacactggcacccatgcacacacactcacccacacgcttacacacatgtatgtgaatgcacaggcacatacaggcacccatgtgcacaccacacacacacaatgcacacacacacacacacacacacacacacacacacacacacacacacacagctttatgagctttctagacatacagagaatggaaaacaacatgataaacaaatagctcaaaacaccacctggtattttgtctgtctcaaaccaactaaccagccagctaaccaagtaaccagccagtcaacaatgctgctatgaacattgttgaacacatgtccttatttatgaacatgcattgtgtgggtatatgccgaagagaggaattgctgggtcttgtggtagactgattcccatttgtctgagcaactgccatactgatttccaaattggtcttacaacttttcactcccaccagcaatggaggaatgttcctttttcttcacatcgtcatgattctatttggccacttacacgacatgcttttggtcctttttgctgtaccattttaacagtctatttagatggccactgtcagtacttttaggaggactgacggggaggtgtacacaaagttcacaaaacgagacaaagctactctttatagctccctcaggcggggtttgctcataatcacggtgcagaaatttttaatatttttcagtcattttgagtcaatagatttttggaagatttactcatggttcatctatgtttctgtgagatgtgtcagaagcaaacaacaccacatgcagatttgagcccccggcccctcagctaagttggccagttcacagtggtgaagcatttcctcagctttgctgggaggagtttacttctgtctctgaagctgtgaggagaactggatgcctctggagctgttggagcgacaggagtgggtctaagcagcgctacacacacacacacacacacacacacacacacacacacacactcatacacacacacacactcatacacacacacacactcatacacacacacacactcatacacacacacacactcatacacacacacacactcatacacacacacacactcatacacacacacacactcatacacaccatacacacacaccatacacacacacacacacacacacacacacacacacacacacacacgattccatgtatatatgaaatacatgtctcctcacacctgaaaagtcaaacaaggaaaaaaaaggtaccttatgtgcgcatgaatgacacgagagtgctcaggacggttgctttggtattggagtgggggactttggtgggggattgactctagagggcgtgagggagcactctgggtggtgggaatgtccccgtctggacttcatgtggtgtactcctgcctgcacttttgtgagaaccctgcatacctcccatctgatgctcccaatcacagagcagaattgactccatgtgtggctcatctggccggctgggaagaattaaggatcagttttgcagattaaaatcctgagttttgcaataatactgaaatgtcagtgtttgacagtgatgagacggagcttggccacgtgcggtgcaaaatccttttaggtctccagtgtaggggatgggaagtaatttcctcccaagtcgtctgtgatatccagaggcgatgggtggtgacatcctcatttcctccctgtgactgtgtagcaatcactctgacacaagcaagcagggggcggggaggggcagggatggggtggggggtacggttatttcatctcatacttccaggtcacagtagttactaagggaagtgggggcagaaccatggaggagactgctttcgggcatgctgggatagttttcttatatagcccaggcccactgccctaggaatggtgtcactcacagtgggctggaccctcccacatccatcaacggtagagataaatgccacaggccattgtgaccagggcaactcctctttcaattgagactccctctttggtgactctagataacaggcagagaggacttaaaacaagacacaaattagctgtgggtaaatttcagttctgctaagtctcgagcttcctctaaatccacctgtgaataattgtcagacccaattgtgatttgtaactctgtccccgtggagtgatttatgagacagaaaacttaaatttagtttgtgcggcttcagtgttacacaaatgagacagggctcattggggcaacaaaaacaagagcgtcttcccaacggatcctttgatttcagggttctctcacggaattggggttccctctttaagtacttccctccttttcaatttctctttttcttttctccctcccctttcatacctccttccttccttttctttccttcccccccccttttttttttggtgagagggtctccatatagccctggctgtcctggaatcgctatgtagatgaggctaggcttgaactcacagagagcacacctgattgtttttattttaaacctaactatgatgattcccattttctctaatctttcaacatactatcagctcaaattcctgatgtagagttaattatctttaaaaaattgaaattctagggtgtttattttccagagaattaaaaagaatatgtgttaactgcttaactgaaaagctgaaaatgttagctaattatggctaacaagtagtgagaatttttttttcagcgttgagtactggtcactttggacttgtcttcaaagtctagaattagaaatttccttgtggtaatggatatgggacctcctgcacatctgtggtttgtgcagtggatatggacacactgtgtgcctgtgatctgtacagtggacatggacacactgtgtgcctgtgacttgtgaagtggacatggacacactgtgtgcttgtgacttgtgcagtggacatggacacacttgtgtgcctgtgatcggtgcagtggtcatggacacactgtatgcctgtgatctgtacagtggacatgggcacactgtgtgcctgtgatctgtacagtggacatgggcactctgtgtgcctgtggttttcacgggttgggttgatgttttttaagctgtagaagtccacggctttagcatttctcatcacaagtgaaaaatgcagcatctttgaattggagacctctgagttggccatacatggaaaagccaggagaattctgtggtccacatgccacaggcatgtgggagggtgggaatgcaccctcctatcttcccgactacatgtgttagacattaggatgctttttggcatctggattttaatttgttggtgacaggatctatatttggggaaagaattgtctgggctaaccttcttcccaacaatcatttgattaaatggttattttccatgcacatctaagtaagatccagacacggtgggtgcctcagactgctgtgtgagccagggttaaggttaacaaaggggcctgttcctcattagtgtgagaaggcgtccctcggaggctagcccataaacatactccacagtggggtaaaggtacagtgacttaaaaccatcactgcctgtgaccaccagcacacctgcaacacctggccaagatgggggctgtgcagtgatttgggaacaatggttgggttgtttgagagtcctggacaacggttgcctccgccttgcaattattctgctagaaagcagagggctctcacgtccttgagttgcagccacctctgtccagccttggaaattcctgttatgtaattttctaaccccctttttgttatcccagtcaccatataacaaagatttccaggacttcaaaatgaaactcaagatcatttctgcctgaaatatgcccatccgagaaatggccagtgctccatgcactctaaatcgtgttcctggaacatttccctttattgactcaggcagccatgcagttggagcaggcggtggattcaaagcggctccgtcttttaacggtgtacttgtgtatagctaccatggcgcactgccgtccagcccatacacattcctttagacatcttttaaattcttttaaaatttattatttgtgccttaatcctgtgagcattcccacagtttacattcttttatccttcagggttctgttgctctgcctttcattttcttttcttgttttctcgagacagggtttccctgtgtagctttggaacctgtcctggaactagctcttgtagaccaggctggtctcgaactcacagagacccgcctgcctctgcctcccgagtgctgggattaaaggcgtgtgccacattattccccttcttcttggctcacaccctccagatttctggaatgttctttgccagatgccgaggcctttccttcaggcagaatttcacaaacacccaagaccactgtttgcaaagaagggttgatacttattcttttgagtccagttgcttgttgtaggagctgggatgtaggaaacatggtgggacccaagtcttaagagtgacagggcgttccggtggctggctgactgtggaggtgtgggcgcaagatgtgttgtgtagtgtgtatggagaaaatggataccgagtcaaactcacgggatgacaggcagccgttcctcagtgaacacatttgtgcttgtcatctgtctctataatggcctcagataaggtaatgcttcctaggttctgaataattggatttctagtcagaggagataagtgaatgcaagcttattggagaatacagccccccccaccccatgagaagctttgatcccatgtccaagctctctttatgttatgagagccccacagcccttggtctgagtatggaatagggcatctgacagtttgtgcgctcttggtacccagccagggcctttccaccaccccgctgtattggtaattactaaaaccatgagttttgcaacagacactttattccctgggcagccagactccaatccttctcactaaggatgtggttcaaaggtatttattggcctaaaaaaaaaaaaaaaaaaaaaagggggtttgagatgtagggaagccacataaggaagtgtcagtatcggtggcccacacatgtgcaaacatgcttcggaccttcatgggaggcctgtttagaaaatagcctgtggctgggtctgccatccctgatgtcataagggttctcaggctgaccttcaggggcataagtgaagaggtctgctttagcgtttcgaaccaattaagatgatttctaagtctctcttaagaaacaaaacaaaaatcaactaaaaccattgaaacaatccttgtgggccacgctcagcaaggtgtttacagagcaacaggctgtgcagggcagagccttgtttctctgttacttaattaagtcacttctgaaagcaatgatgagagccagtgacagtcggagaaaccacatggtgaatttaggtttctctgagcttccgaagaaagcttgtgctctttgggttttaagccctcttttcttttgaagcaggctcttgtcatgttgcccaggctggcctagagcttcttcactctagccatccccctgccccagcctctcagggagggcaacaggcaccatcctctcttcctggtcctctagattttaaactttagggctgaaacattttataagaaagggataagagaaccttattaatttgcatatagggacttggtcacagtctttgctcccccactgctaatcgctgtatcttagagataaaaccattttctttttctggtttgttaagccattctacaacatggtgacacctactgccctttgcacagctacgtcctagcttttgtaatagccaatgaaaacccaaagatccccaaggtgcagcgagttacatgtgggggtgtgaggaacacagccaagtcctcatgatgaaattaacaagccgtgtcgatgccgaggccacccaggttttacgcgtgttaactcagtcctcttcttttgccaggcaacaatgtcatgaggaccatccacggggtaggagagatgatgacccaaatggtgcttagcagaggctccatcttcccagtgagtgtgcccgaagcgcagcccagcgcccacctcagcaagcaggcaagccccagtgaccaggaggacgtgacggtgatggacaccaagctgaaggtcattgagattctacaggtgcgtcctgcagctggactccggcggtgatgctgggccccattggtttctcttaagtgttgttgttgttgttgtaagtgtggtgtgagtgtggtgtgtgtgtgtgtgtgtgtgtgtgtgtgtgtgtgtgtgtgtgtgtggcacaggctcatgtggaccttgtggcaatcctcctgcctcagcttcctgagtgctgagattccagatgttaggcactgcatctggtttcactgtgtaaatgtattgaaacgctgtcggtgtcacgtgagtctgaaatgttattggtctcattttattctgaaaagctattgccccatcttcttattacttttaagtgaagggcagagctggcaatgcatcgcacaccatcgcttctttgcacactcgtcctgtggtttctgtcccttgaaatactctgggatagaatagctgatgtctagcagctgtggagtgctttgagcttggtaaattgctttcctgtgtgtttaatatcagctagtgttgaccccggttggatttttcttcatttaagagagattttttaaagcaggcatgtttaatgatgggattccaatcattttcctgctttcagttgcttggaacttgtttgtgaattccatgttttagatttcctgttgttatgggaaacacaagagttttatgtcagacatgttaggatacgcctataaatctagctctcaggaggctgaggcaggaagatttctgtgagttcaaggccagcctgacagtggaagaccctgcttcacccccaagacattatttaccagacttgttaattgttggttttattactttacacaattacctccctttgtgtttctaagaggctaaggatttttttcacattagcaaagtttaatacctacctttatcaatttaatgagctcagttatttcatgcagcagatccctatatgatttctagcatttttgaggggaggggaggtaagcctgggaagcaggcgtatggtacctttgttgtagtgtttataccagagtcagagaatggagcctgtagctttccggaccgccttgaggatgtgaaccgagtttccccacatctttcatcatcatctaacgtagactgagagctaccagaagtgggtcagcagtcctggcaggctccgtgcattcctcattctaagtaattagatttataatcataaaacatttcccagttcctccagggtttccaaaggccaagtcccaagaaatgttggcaggcttccccaccctgtgttcatggccttggaacttcatatgtaatgttttatcctgaagctgagaaagtactgaaggggccccaggtcagcctcacgaccccgtccatggcatgagggatgaccagtgatgcatgcggccccgttttcaaccgcggttttggcaatggtgcctttcgcagtgacagcgggaagtgtgctgtgtggctgagtctggctggtttctgcctccttccagcacttgaagaattcttttctgaaccgcttttgctgtctgactgtccacccagggtctcccgtttcaaggtgtggtgctgtcaatctgctgcctcctcagaacggccgttcatcaagtccttggtggccgcaggccctggctgctgctggctctctgccagctcctcctcctgggggggggctcccctctttacctcaccgaagaacatggttttcagtgagcgttattttgttcttgccctctgaccttacttattctctctgcctttacaagttcttaaatttatttttagtttttaagacaaggttcgttctgtatccctgaccgggccagagctcactgtgtaatgtaggccgatcttgaactcatgggaatcctcctgcctcagtcccccaggtgctgaggatgctgggattataggtgtgagccaccatgcctggcctttctctgccttgttgtcatctgctttttgttttttttaattttacactatctgcatcttcataatgagacacattagaggagcaaaggttgtgaaattcagttctgtgagttttcatctccaacagacgtgaatgcttcattagtgtttcgtattgaattctctcccccgccctttggacacttgagctttaaaaactgtgtattgagtacctgttgcctagccctgactctgtcctattcactggagtctcttcattgagcgtgtgttgtattcacagcaggttactaagagtcactgtggggtttatctttacttctggactttatactcctcaagagccacatttacaccctggccaccttaaagtactatgttaaaaaggatttttaacttctgtgtgtatgtgtgtgtacgtgtgtgtggtgtgtgcacaggaatgcaggtgctcgcggaaaccacagagtatcggatcccttggagctggagttacaggtggctgtgtgccatctgacatgggtgctgggaatcaaacttgagtctctcgcaagagcagcgtctccccagtcctgtgggcaccctttatacaacaccgtcttccttcctccctggctatcaaatgtggataaactgaagtaagaggagctgacataggctttcttccatcctgatgcagcaccttccaagtgtgtgttgggcgaggatgggtggagatggagggagagagagggggaaaggaaggggaggtatgaagagataaagataagggagagggagggggaaatagagagagggggcatctatccaaaccctggccatggaatcataagaagcgtcatacggacactttcagtgtcttgagagctcgctctcatgggtggagaagagactcaaggtgcagtggacgctgaagaaacatgaaattgcaacagaaaattgtgtgtgacatggtggccatgggccaaagtagtgtgagcactgagagagggggtgaggcctggggaggaagggagggttgtggaaacgagcagaaggctgctgagaacacagaagccagcttttctaaagcctgggctaccacattgtctaacgttcccagaaggaggaggccctttgagactacaggacactggtaatcgctatgctcagaaatccagcccatctcaggccagctgagatttgagcacatccgtccggatgtcttctctgatcccacggctcagccttgcaggtcatctcctaacacaggtgtcccccgttttcccagtgcagttacttgctccgtccaggaaggggttttcaatgtttgggttccccaaggctccctgcagagctcaggccttaagggctacttcatcgctgtccacatctcagccactgaggtgatgataacagaggagacacagacaccatggagaaacccaggcaccagcattccagccatcctggctgtccttgcttctgggcagatgtccccagggctggagcaactccactgcagttaaagctgcaggctttctgggcacaaaagccgttcctgcatctccctctccacaaaggatattgccagggtgtctgaggtcataccagcattacctcttcagacacacaagacgcccctccctgaagtgttcagagaacagtgtggggtgccagatttccttgtttctaaaactcgatgtagaccagtgtggtggcacacacctgtgatccaagctctggggaacaggagttcaagggtatcctctgctacatagggaatttgaggccaacctggggtacaggagaccctgtctcaaaaccaaccacccaaccaacaaaccaaccaaacaaccaaataaacaaccaaaaagaaaaaaaaaacaatcacaaattaattaattactgtgggctttcattagtactgaccaatgaaaacataatcctttccttcattttaaaactgaccaaaacaggtaaacaaccgagagtttatagtttacaaacaaggtctctgattggttcatttggacgattgacagcatggttgttggtgtgtgccacggcttgcattaaaaattcattatgtccacatgggggcacccatatcgcagtgtttgttgtggaggtcagaggacaacttgatggagtttccttcctcacaccttcacaggagttctggggatgcaacccaggttcccaggctttcttggcaagggttttgccctctgagctgtttccccagcctgcgtctcgtgtttaagcgccgtgctgctggctgcggcatcttagcagtgtggcgtctctcagcaccggctcatggaactaagcttgctatgttgcttcttccagttcatcctgagtgtcaggctggattaccggatctcatacatgctgtccatatacaagaaggaatttggggagaacaatgacaatggtgacacctctgccagtggatccccggacacgttgctaccatcaggtaactttgtgataggatttgctcttgcattttatgttctttttaaaatttatcttaaatgttacttttttttttctgagacagggtttctctgtattgttttggagtctgtcctggaactcagtcaatagaccaggctggcttcaaagtcacagagatcctcctgcctctgcctcccgagtgctgggatttaaggtgtgcgtcaccaatgccggctaaatgatactttttatttcttggaaatttcttgtatttatacaatgtattttgatcatatccatccatcactatctccctccaacccctgcaccccacacacacctcacctccctccccagttcatttccttgttttattgttattgacaacccttgaatccactcagtgctgcccgtatgaacatgggtgtgtgactattcactagggtatggtcaacctaccaatagccatgtccccaaagaagagtgactctctcttgctcagcagccttcagttgccaatatccacgctagagttttggctggcctggtcttgtagaggtgtccaaggcttctgtgagttggtgagtgtgccagccacactatttctaacacgggcatctcaaagcactcctctccctttatggactcttgcgttctttccgacacatctacaaagttccctgtgccttggatggtgatggcaggaggctggagatgacccattccagctgagcactcggtgtgatttagactgtgtattttgactggttctctgcattaaccttttcccacgcaacaagaagcttctctgaccagagctgagagcagtacaggtctatgcaatgatataaacatagatatcatgagctattgtgtaggcattaatccctgctgctgtgcaggcttcaggcccaatcaaaaggtggctggtcactcctatagccatcatgccgctattgcaccggtgagcacgtcttggcagcgtgtcagtattgacatacacagggtccggcacacagccaggtgagggttgaagtattttctcccctgggctctgatggggttgactgctctttgtcttgagtccaaagtcagtggtgtcttcagcaattgactcttgtcatttacttttgaggggcaatcaggagcaaacaataatctgtgttgttctgggtgcccccctgggcctctctgatgggtcaataactcacagggaggcattctgtgccttgcactgggttttaatttaaaataacccatgtttgctagaagtagcaccatctacccatgtgggggcttgcattcagattccatgtgtgcatgtgtgtatatacacacatatgtgtgtatgtgtccatgtgtgttgtctgtatgtatatatgtatgtgtgtggtatgtatatacatacatgtatatttgcatatgtgtccacatatgtgtgcatgtgcgtgtatatatatatatgtctatacacatgtgcattttcatgcatgtgtggtgtgtaatgtgtttgcatatgtatgtgcatatacatatgcgtatacgcacatgtgtgcgtatatgtatatacacacacgcatgtgtgaatacatatatagatatatacacatacgtgtgtgtgtgtgtgtgtgtgtgtgtgtgtgtgtgtgtatttaatcagcttacaaaacaatggattgccataagcttctttgtgatccttgattttgctctctgctttaaagaccccaggcacctttcatacctgtcttagaacaaaagtatttctatgtcagaagatgacaatctctcccaggtgaaactgagacagagcagtagaaagaggaacttgctgtttttggcactgtgtccggcacaggccaggtttttggcctgtccccatactgcctccactgtgataggtagaggtgctgttattacaaatttaacagatgataaaagtcagtcaggggagtgacttgggaagatctgtacatttgttagtgttgctgtgatgaaagcaactggagggaggaagggtgacaagcagttcagtctggaaggggcagcaaggggcggggtgcgaggtgactggtcacattgtctccacagtcaggaagcagggaaagttgaatgctggagctcggttcactttccccttttagcacaggaactcctgtggtggtgccacccacattcagggggcccttcccacctccatgaaaccttcccggataccctcacagacacagccagggtgggtttccatggtgattctaaattcaggcaggtccacagtgagggctaccacagtcatcaaagccccgggcccctgaggcctcttcagcgtcagagtcagagtcttttgcacattttgttcttttggtgaaaatctgagaacagtgttcatgcctggatcaaagagcagcgtgaagtgcagctggcagggcagggttttcggggaagccatggttagccggagaacaaaggggaagggctcccgaaggctcgcctgtggtggtgccaggctctgtgcctttccctcaggaatcccatctcacatttagacattcgaatgtctctgagacttggagcataacccaaagagcacagaaatggctgtgaaatttgaggctatagaaaggactttgtgaagactaagaaatgttagctcacctttttcctggttgggccaggtcggtcttggtggtctataaaccacatcttaggatatagacagccagttagcaaagctcttctgagacagcagtgcagataggaaactcctggacagtgttaggaaccacgtccttctccagccatcagctggtcaggcaagaacaggccattgcctgctagtttagtgagaatggggaccagaccagttgcctcgctacccacctctgctctgcgggcagccttccctgcagaccagcagccacccttccgcctaggcgaggagccactcctggcacccccaacacagcagtttcccagaagtgcagaaccccaaagggctgtttccaggaatgatcaggcagaaccagaaagtcatgctggcggctgcattgacagaaacataacagttactggctcccagaagccagacttctggaaatacaagctctgagtgtcagtaaagtacccaagcaaaggttaaaggcacgccagaaaatcctctggtggagtctctctctctctttgtctctctgtctctctctctgtctctgtctctctctgtctctttctctttctctctcataggatttccccctctatttgtatcttgatctcttttcatgctctagatatgagaaatacataatctatcatttgaacatgttgtcttagtaaaggtatcttcaatatggtggtggcagggcatggtgaggacttgtgattgggtcacatggcaaatgaccccaccccattctacaagaaaaagagaaggaatttcttttattttgagcttgtttttattgagctcctctccctttctcctctcttcttcccttctaccctccctctgcccccatgctcccaatgtactcaggagatcttgtcttgtttgcccttcctaggcagatccatgtctgtctgtctttgttacctaggttctctggagttatggactgtaggctggttgtcctttgctttatgtctaatacccacttatgagtgagtacatattatatttgtctttctgtgtttgggataccacacccaggattttttttttctagttttatccatttgtctgcacatttcaagatgtcattgctttttattgctgagcagtactccatgtgtaaatataccaccttttctttatccattcattggttgaggggaatctaggttgtttttaggttctggctattatgaataatgctgctatgaacataattgagaaaatgttcttttatcgtgagaatgcatcctttggtatatgtccaaaagtggtattgctgggtattgtggtaaacagattcccatttttccgagaaaccacagtactgatttccaaggggctgtaaaaatttgcacttcagccagcaatggaggagtgttccccttactccacatccgctccagcatgagctgtcatcagtgtttttgatcgtagccattctggcaggagcaagatggtacctcagagatggtttgacttgcacttctctgatggctaaggatgttgagcacttccttaagtgtctttctgctgtttgagattgttctctcgagagctctcaatatctgtaccccatattttcattagattattttgtagtttgatgtctagtttcttgagttctttatatgttttggagataagccctctgtcagatgtggttttggtcaagatcttttcccattctgtaggaagtcattttgtcttgttgactgtgtcctttgctttgcagaagcttctcggtttcaggaggtcccatttattaattgttgatctcagtgtctgtgctactggtgttctatttaggaagtggtctcctgtgttcaaggctacttcccactctctcttctttgagtgtggttggttttatgctgatatatttgacccatttggacttgagttttgtgcatgggggtagatacagacctatttgcattcttctacacgtcaacatccacttatgccagcaccatttgttaaagatgccttgttttttccattttataattttagccttttttttgtaaaaaaaatcaggtgttcatggttatatggattgatatcagggtctttgattcgattccattggtctacctgtctgtttttgtgccaataccaagctttttttgttactgtggctctatagtagagtttgaagtcagggatggtgatgcctccagaatttcttttattatacaggattgttttggctgtccttgttttttgttttttcatatgaatttgagtatcattcttctgaagtttgtgaagaattatgcttggattttgatggggattgcattgaatctataggttgcttttgggtaagatttctatttttactatgttaatcttacctatccaagagcatgggagatctttccattttctgatatcttcttaaatttctttttccacagatttaaagttcccgtcatacaggtctttcacttgtttgattagagttacccaagatatttaatgttatttgtggctattgtgaaggctgatgtttccctgatttctttcttggccctttatcatttgtatataggagggctactgatttgtttgagttaatgttgtatcctgtcacattactgaatgtgtttatcagctgtaggagtttctggtagaattttttgactctctcatgtatactatcctatcatcagcatacagtgaaagtttgacttctccctttccaatttgtattccctttgaatttttctccatttaatttgatgttaggtattggcttgctgtatattgctttattatgtttaggaatgttccttttatccctgatctctcaaaaacctttatcatgaaggggtgttggattttgtcaaaggccttttcagcatctaatgcaatgatcatgtgtttttttctttcagtttatttatgtggtgaattacattgatggattttcatacgttgaaccattcctatatttctgggatgaagcctacttgatcatggtggatgattttttcatgtgttcttggatttgatttggcagtattttattgagtatttttgcattagtattcatgagggagattggtctgtagttctctttcttagttgtatctttgtgtggtatcagcataactgtggtcttataaaagagtttggtaatctttcttctgtttctattgtgtggaacaatttgaagagtatcgttattagctcttctgtgaaattcaggcagaattctgcactgaaaccatgtggtcctgttttatttctggtggagagacttttgatgactctttctattattttaggggttataggtctatttaatttgtttatcagttttgatttaattttgatatatggtactcatccaggaaattgtccatttcctttaaattttccaatttagtggagttttgaagtatgacctgatgattctctggatttcctcagtgtctattgttatgtccccttttcatttctgattttgttaatttgggtattctctgtctgacttttggtttgtttatcttgttgactttttcaaagaactaactctttgtttcattgattctttgtattgttctctttgcttctattttattgatttcagccctcaatttgattatttccagccatctactcctcctgggtgagtttgcttctttttattctagagctttcacttgttctgttagttcactggtgtggaatttttccagattctttatgtaggcatttagtgctatgaacttttctcttagcactgctttcattgcctcatgagtttgggtatattgtgcagtcattttcattgaattttaggaagcctttaatttcttttttttttttaatttcttccttgacacattggtgattcagttgagtattgttcaattttcatgagtttgtgggttttctgcagttagtgttactattgaattctaactttaaaccatgatgatctgataagatacagggggttattccagtttttaaatgtctgttgagatttattttgttggtgagtatgtggtcaattttagagaaggttccatgagatgatgagaagaaggtatattcttttgtgtttgggaggaatattctatatttctgttaagcccatttgagtcaaaacatctgttagttcatctatttctctgttaggtttctgtctggcagacctgtccattagtgagagtgggatgttgaagtctcccactattagtgtttcgggcttcacgtgtgatttaagctttagtaatgtttcttttacaaatgtgggtgcccttgtatttggagcacatatgctcagaattgagacttcatcttgatggatttttcttgtgacaaatatgaaatgttcttcttcatctcttttggttacttttagttggaagtctattttgtcagatattaggatagctatccctgcttgtttcttaggtccatttgattggaaaaaatcttttcccaatccttttttttccagacaggatttctctgtatcgttttggagcctgtcctggaactcgctctgtagaccaggctggtctcgaactcacagagatccgcctgtctctgcctcctgagtgctgggattaaaggcgtgcaccactaatgcctggctcctaatcctttactttaaggtaatgcctgtgtttgtagttgaggtgtgtttcttgtatgcagcagaaggctggattctgcttttgtatccattctgttagcctgtgtctttttatcggtgaattgagactattgatattaagggatattaatgaccagtgtttgctagttccagttattttgttgttgtgcatacatttccatgctttgcaatttgctgttatgggattatcttttgcctgtgtttttgtgggtgtaactaatttccttgggttggagttttccttctagtttattgataggtattgtttaaatattgttttgacatggaatattttgttttctccgtctatggtgatggaaagctttgctgggtataatagtctgggttggcatccatggtcccttagtgtcccttagtgtctgcataacatctgtacaggaccttctggctttcattgtttccattgagaagtcaggtgtgattctgataggtttgcctttatatgttacttagccttttcccgttgtggctcttaatattctttctttcttctgtatgtttagtgttttattattatttggcgagaggaattttttttcttttttggtccagcgtatttggtgttctgtaatcttcttgtactttcataggtatgctcttctttagattggaaaagttttcttccatgattttgttgaatatgttttctgtgtctttgagctggaattcctctccttctactatccctgttattcttaggtccagtcttctcatggtgtcccagatttcctgaatattttgtgttaggaatttgttggatttaacatttcctttgtctgatgaatctattacctctattgtatcttcagtgcctgagattatctttttcctctcctgtattctgttgtttacacctgcatctgtggttcctgttcatttacccagattttccgtttccaggatttcctcagtttgtgttttctttattgcctctatttcattttttaagtcttgaactgtttgttgcctttgcctgtttgattgccttttcttggttttcttttagggatttgttgatttcttgttttttgtttgtctttccctccgtttctttaagggagtttttcatttcctctttaggtgcttctattatcttcataaagttgttttaaggctattttcttctgcttccactgggttgggatgttcgggtcttgctgttgtagagtccctagtttctggaggtgccatatgtctcttcatgttgttgaatgtgttcttgtcttcttgtctatccatctcttcttctgatcagcacaggtgcagcctgtgcttcagggcatccctctttctccagttggtgtagttgggggatgccactctgttgattgctcctccaggagcaggcagggctgagtcactgatggctgctcctctaggtgcaggtggttctgatgctccagaggtcactaacgctgctgggtgtcacatacagagaatggcactggaggctggatgggacacaggtgctctttcccagaggagcttcttactactgtttctggaagccaccgctgtcaatgcttcagcattgcccagttcatgcactgtctgctccctggttgtttgtgacctgcctgacccttcctctccccagttggtagggaagaaggaatttcaaatgtagaaaggtcacattgaaggaggaacagagtggctctttacatggattttaattccttaaaaaatgcttttcccttgggtctggagagatggaccagctgtcaagagcactggctgatcttgaaccctcattaggttcctgacatcttcatggtgtctcacaactgtatgtagtcccagggcatctgagatccttttctggcctctgtggacactgcacacaggtggtgcagagacaaacatgcaggaacagcatccacacacatgaaataaaagtaaaggagaaagaattgttcttctgtgccattagcagtgcaatattgtgtgtttttatggagggacacatgtatatttgacttatcaaatacaaacatacacacttagaaataagagtgcctttgctaagatggctgttgatcggttaacacatctgatggcagtaacatatagtgtaaataatataagcacagcttatattaaaggattgaagagtgagatagcacatttgtagcctggattcaatatatagcatctaaatacacacacacacacacacacacacacacacacacacacacacacacacacacacacacgcagaaactgcaattaagatgttcaagtttgttctagttttgtttttgttgttgtgataaaatactctggtaaaaagtagtttaggggagaaaggggtttgtttcagtctatatattcaggttatggtctatcatgacagggaagtcacagaacatgcccttgagagaatgggtcatcatatcatgtccacactcagtcatatcatgtccacgggagagagaagtcattgcacacatgcttgcttatttgtgctcagcttgacttctgtatagttcaggacctcctacctagggaatggtgccacccatggtgggctggatcttcccacatcaatgaacattagtaatcaagacagccccacccacgtgtctacaggctaacccaatatagacaattcctcattgtgattctacattatgtcaagttgacaaagcgccatcacactgattgagtggaactgtattgtaactttctgagctattaatgttcggtgtcacaaaaagtgttaaaataacatgagttaaaacaagatgaagactctccctgtgtgtcttcacagctattgttcctgacattgacgagattgcagcccgggcagaaacgatgtttgctggaaggtactgtaatgaatctttttatcttacatgcgagatacctagaattttgtttagtttgttatcattcatctttttgtgcctggttagataccccagttgctgctaacataatttctgccagaaatgaaggttggaatttactctagacaccttaaacgatgggagaaaagagatccatgtatttaacatcctggaattcttagcttttctttccttagatgatggcagcacacagatgccctctagctcccttgacagaaacttgttgtatcttgtaacacattacgtctcagagtcttagatctctgtggcaagaaagtagcatcttttgatgttatccttaactttatgcatgagaaaccaggcatttcttgccatttagaagtgtccacgatggaagaaaataaggtgtctgatgtgaccactctcctttgcttgccacgtcctggcatgtattgttgtcaagtttatttttcagaaatgaaacaatagcagtcaaaatgagaaagtaaatgtcagctagaattactgagattcatttttattacagacctgaggtaacctgaggagatagaactgtccacactgaactccctactgcctcttttttctcagagaggggaaaaagggggctggagagatggctcagagtttaagaaagggggaaaggattaataattaacataactgtaagatccacggtttcatagtagcctgggctacgtagtgagaatctgtgtaggggaggaggaggcgggaggagggaggagggaaggacagagcgcccagatttattgtttagtgaacatttggtatagctttatttttctactgttatgatttcctattgaagtattttattattctagggaagaaagataaatccagcctatgattttatcttaagacacagacatgaactgcttaatgtcactttggccaaagatggctccaggtgatagatcgatgaggatagaattgtgttctataacatggcaagaactgaaaaattcccagagacaagtgacttcatagccatcggttgttagattgcagtgtgttagtgtctgtggaggggcttgaggaaagcaccagacagccaactgtgtcagtgtgtggcgtgtgcagccacacgcagcatgcagtacttgagagtgactgttgctggcttatgcattgaatatatttttaaccattattttggtgtgtctgtatgtgcaggcacacgtgtgtgcatgtgtcagagtgtgtgtgcatgtgtgagagtgtatgtatgcatgtaactacgtgtgcatgcagtgtgtgagtgtgtgtgcatgtgtgagtgtgtgcctgtgtgtatgtgtgcatgtgtgtgtgtgtgagacagtgtatgcatgcatgtatgcatgtgtgagagtgtgtatatgtgtgcatgcacgtgtgagagtgtttgtgttcatgtgttcatgtgtgtgcatatgtgagagtgtgtgttcatgtgtgaatgttcatgtgtgagagtgtgtgtgcatgtgtgagagtgtatgtatgcgtgtaactacatgtgcatgcagtgtatgagtgtgtgtgcatgtgtgtgtgtgcctgtgtgtttgtgtgcatgtaagtatgtgtgcatgtgtgtgtgagtgtgtgagacagtgtattcatgcatgtgtgcaagtgtgagaatgtgtgcacatgtgtgagtgtgtgcatgtgtgcatgtaagtacgtgtgcatgcgtgtgtgagtgtgtgtattgtgagtgtgtgtatgtgtgcatgtaagtacgtgtgcatgcgtgtgtgtgtgagtgtgtaagtgtgagtgtgtgcatgtaagtatgtgtgcatgcatgtgtgtgtgagagtgtgaatgtgagtgtgtgtgcatgtaagtatgtgtgcatgtgtgtgtgagtgtgtgtattgtgagtgtgtgtgttcatgtaagtacgtgtgcatgtgtgtgtgtgtgagtgtgtgtgagtgtgtgaatgtgtgtgtgcatgtaagtacgtgtgcatgcgtgtgtgtgtgagtgtgtgtattgtgggggtgtgtgtgcatgtaagtacgtgtgcatgcgtgtgtgtgtgagtgtgtgtattgtgggggtgtgtgtgcatgtaagtacgtgtgcatgcgtgtgtgtgtgtgtgtgtgtgagtgtgtgtattgtgagtgagtgtgtgtgcatgtaagtacgtgtgcatgcgtttgtgtgtgagtgtgtgtatgtgtgagtgtgtgtgcatgtaagtacgtgtgcatgcgtgtgtgaacgtgtgatcagcagcatctcgtgccccttgtctcccaattgcatcatttctcatgtgctttgtttaaccttgtgttgctttgttcatcgagatcctagattccatacattataatctgtctgtcatgtatgtatcaatcacctacttacatgtctaaacatacctgccatttaacatctacctatatatatatatacatatatacatctgcctatcatctatgtatatccatgtatcttgtctatcaatcacctgtctgtgagtgtctgcatcgatgggtctgccatgcgccgtatacctgtctctgcgcgcatcggttttgcgtgtcggtcatttacatgtgcatccatctgctgcctgtgttctgtgtatctgtcatctgccatccgtctctttcatatccatcttcccccacccatgtaacccatacatgcattaacacaggtgtgtgataggctctgtaggcttgcgtcatgccctctgtagtgcttgcccaaccacagtcatctaagggttacatcccagagcacagcccggcagcagcagcacatgctccagagagatctttcaccccaggggaccctgtccccagtctcactgtgccaccaagcacacagagccccgtggagatggctgtgtgtttgtcactgtccctcaccgcttgccgtgtggtggtctcttgggctccaggctgttggtcgatattattgataaaagctttcgcagaaggcggctcttctagaagagtggcagggcaaggaggacaaagagggatagtgggaaaatttgaactagtaatgaactgttatgaaaatgtcataatgaaacccattattttatatgctaggtaacaatgaatcgaaaatgatgtagggatcacccagtgcttgtttttcctgttctctggtgattaactcttgagactgactgaggaaccttctttgttattgttccctcatcaattgtataagattaagaagtaacaatgtctcttcttttttgggaaaatgagggtttaagtttaaaaacacaggtataacttcagtgaatttaatatagatatcatgcgatgtgttattttagagtttcttttggttttacaggaaggaaaaaactccagttcagcttgatgatgaaggaggcaggacgttcttgcgggtcctcatccacctgatcatgcatgactaccccccgttgctctcgggggccttgcagctcttattcaagcacttcagccagagagcagaagtgctgcaggcctttaaacaggtgagctggggctgggtgcctgcttgccgagctcgctcgggctctgggttcagttctcagctctgtacccaagaaaacgaacacccgagatggagggccctggaaaaggaacacctgagaattcctggagttctgaaggtgtttgtagcccgtctgatggtagctgcagatgaggctgtgttccttggatcctctcttgctctgtagtacaggctggctcagaattcagttcattgctcggattgaccttgaactcttggcaatccccctgcctctgcccctggagtgctggaattgcaggcgtgcactgcaatacctggcttgttactttgtgttctgaaagatagatgtggtcctgtctgtgtgcctagacaggagctgcttcagaatgagtctcccacaggtgatcttcagtcagtatctttataaaaatgacagtctctagaatttaggaagtgctgctggaacaataacctattagaaattttgttgctgctgtggttattttgactacagaatttaatgatgcacctggcaagccatagcttcaaaataaatattttgtgattaaaaatggagaacatccaaagaaaggaactttaatgggggatccatcttgtcccctgtgatgggatctagtctatcttctgtgatgggatctagtctgttttctctgatggatccatcctgtgccctgtgatggggtccatcctgtcccctgtgatgggatctggcctgtcttctgtgatgggatctggcctgtcttctgtgatgggatctggtttgtcttctgtgatgggatctggtctgtcttctgtaatgggatctggtttgtcttctgttatgggatctggcctgtcttctgtgatgggatctgggctgtcttctgtgatgggatctgggctgtcttctgtgatgggatctagtctgttttctctgatgggatccatcctgtgccctgtgatggggtccatcctgtcccctgtgatgggatctgggctgtcttctgtgatgggatctgggctgtcttctgtgatgggatctgggctgtcttctgtgatgggatctgggctgtcttctgtgatgggatctgggctgtcttctgtgatgggatctgttctgtcttccgtgatgtttggattgcacattaatctcacagtgattacttgcaagtatgggtatctcactgatgttttgtgtttagtggagtgtgaacctgtattagcagttttgaagatgctagcagatatgaagatatagatgcatatgttttacatgtatgtgccatgtagtgtgtataaactataaattgtatggtggtctcaagctctgaaactgctgtttatactagcaaacgtatattgtaaccattaatattttcttccatgggtttttatactttgacttttcaaacagatacaagtctagagaaacctcagaaaaatgaacttgaacaatgaaattagagttagattatcttgtaaaagaagatttgtttactcttgatttatttatatgggtatttgcactcatgtaagtatatgtaccttatgtgttcagtacccatggtggccagcagagggtgtcgggcctccgggaactggagttgcaggaggttgcgagcaccatgtgtgttttgggaactgagtttgggtcctctgtaaatgctggaggtgctcttaatccctgggccgtttctccaacccccacaactttatgttaaattacttgtcagcattttggaagctttttgagagcacacatctaagaattccttttcgcgtgtgagcatattggttagagttcgtgaatacttgcaggaagattttcagacggaatacacataagtatgcgtaagtgttcgtaagtgttgaatttcatctagagagtggctgaagatgggatttcgggtgtgcaggagccagggacacagaaggctgggagagcgctctaagggtgaaactctcgtgtcctcaggtgcagctgctggtgtcgaaccaggatgtggataactacaagcaaatcaaggcagatctcgaccagctcaggctgacggtggaaaaatctgagttgtgggttgagaagagcagcagctatgagaatggagagattggcgaaggtcaggccaaaggaggcgaagagacaaatgaggtttgtttccaaggtcactttcaggaagaaaattacttatttctgattgagcgcttaattgaaatgtgtgtctgtgcaccgcgcctgtagtacccatacaggccagagggggcaccataccccccgaacgggggatacagagcgttatgagccgttgtatgggtgttgggaaccaaacgagggccctgtggaagagcagctgctctcttacctgtgtttaacgggggggggggggtccagcccccacttttttttttaaataaaagtgttactggtaatgcttttatgaaagccagttaccaccgaagtcctaattggtggtttctggaaagaagcttatactcctcaggagcatcagtggtgtggagaggctcactcagcacaggtctgggagtattgcttcgggttgtagattggcagcacagaatgtggcaattaaatattaacattaaacattagaaatgccgaggagttacgacgaggtggagttgaagtggtggcatcccacctcaggtctcaggatggtggcttatctgtaattcttcactttaccattttagcattagtggaatatagattttctagtccatacaaatttgttttatgatcagttagggccatggggtggtgacacgataaataaaagacccaccgacagatactggggttcaaacatcaagctgacggtcagaaaagcaaagtagctggccactatctctcacctcaagctcaggctaaaagggctgatccatgcacaagctcttcaccaagcctcaaactgctgcctttcctcagcgtggctggagaatactgagacttcaatgtcttcttgtccctcttggtactgagccttcctatcttcagtgtggctggagaatcaatgcttcctatccccaatgtgaatgcctgatctgagaccctgctcctggtttatatacctccctagtgctgggattaaacgcatgtgatcccaggtgctgagatcgtctttgtgtgagctgtttctctttaggactggatcactcttgtgtaggtctgggtggccttggaatcacagagatctgtctacctcttaatcctgagtcctaggattaaaggtgtgtgccaccacctcctagattctggctactagtattaaagctgtgtgtcaccgctgcctgatctctatagcttgaggctgactttgcttttctgaattctcagtcaagctttaataaatcatgaataatagatcactacagggtggggcacagattcttccataattcatttctgaagtaaggaataagttgacatttctttagttcttcccttgtgcacactgaagagcaaatacttttgtgtgtggaatctccttttaaatgtcacaaaaaaactttggggatggctgtagggctgcctttttaagtttaataaactaaggcttggagaagcccagggctctctcaggccttgaatcggtgactcagccaacatttggatgataagatccaggttctgtaagattgcactttctgacataatgttagcgagttgctatgctttcacaaattacaaaacccctttgttttgaaaaagtcatattttgtatgtgttctgggaagtttactgttgcttttcatctgacttacacatacctctttgagttatttcagtagaagtcttcaggtgggctggagaggtggctcagcaattcagagcactggctgttcttccaaagggccagggttcaattcccagcaccgacatggccactcacaactgtctgtaactccaagatctgatgccctcacacagacatacatgcaggcaaaacaccaatgcacataaaaaacaaaaattattaaaaaaagaattcagatgaggtgtgatggggagatgttgttacttcctggccttcgctgtctatcattaaggactgtggggtgagccctttactgtggcatggagagcccgctgttctcttggacacttctcaggcactttccatgcacataagaaagaagagggcgtatagatggactgcatatattctcaaggtaaaactgtgtagcttgtggcgtagagaactggttctctaggggattcaaacaagtgagtaatgaagctgacacttatttgctgagttccagatttattgattcgggaagtggagattactttaggtatgttgattaggaggtggtttaaatatgaggaattaagtatttggaaaatctggagtgtggaggctgccattggactgttgacttgaaggtcaaatgatcacagtgttgaatggagacgccacttgtgaggcaaaggctgctttgtggccatgtccgtggctgcatctgccaccatagactccctctgtgaatgtatggggcgtgacagtgaatacgaatctcttaggaaattccatgtctgctggaattttccttttggctcccacaattcctgggagatgccttgtagtttcctcctggcctctaggttgcaagtgagctcatctcactggcttgggctgaattggatttagaatggtcactgcaggggagctggagagactggctgcaggcagagctaagtgaaggaagacaacctgatttttttattttttcttgtcaaactgcagttttatatccttaaaccaatcctttccccattgttaaaagacccacattgaagcctaataggcacaattctgctctctgttcccataagttcatcatttctaggttacacataaaattgaaattgtgtgacatttgtcttccagtgaaaacagcctgatttaatacccagagcacagatgataatacagagacgatcagtaggggtgtgagagggttggaaccagataccccaagatctactgctcagcatatgtgcaactcagagtaacttgcttacattttccaagatttatttttatcatctacaacatggacagtgcagtatactgtaaggagtcagtgagccagtccttggtgatgatgatgatgatgatggtgtgtgtgtgtgtgtgtgtgtgtgtgtgtgtgtgtgtgtgtgtgtgtgtgtgctggttaggggttttttcctgtcacttgaatacaatcgtgggtcatctgggaattgggaccctcacctgaaaaaacaccaccagttagcatgacttcagtggacaatcaatcattagcatggcctcagtggacagtcagttaacattgcctcattggtcttgaacaactgacaatatgaatagtaagttgacattagataccagaaaaagcaagcagtaagacccttccttccttccttccttccttccttccttccttccttccttccttcctttctttctttctttctttctttctttctttctgtgtgtatgtcatggatatataagtgcttttacaggcctcttagaactggagttacaggctgttatgaactatgaactgcccaatgtggaccctgggaactgaacttgggtcctctgcaagagcagcaaattttcttaaccatcgagccatctttcaagcctgtgcaaccttaatttattgcttcaggcttgtcatcatggaccagtgggcttaattctgaggctgcccctgaccatatcctagcagcagcattctggtgtcaaatccgtgaccaccacctagaatgaaagggtctttctgagtctcctgtttagggacgagagagcctgtcccaggagtccttctagtaccttctctgaatcctggacacattttaccattaaacctgtgggctaagacatctgtgccaattagtgtttattgtcaactcgacacaagctagagtcatccaggaagaaggaaccttaactgagggattgcctccatcagactgacctgtggacatgtttgtgggaaattgtcttgcctattcattgacggagaagagcacagtgcactgtgggtaacaccatttctgggcagggcaggtggtcctgggttatattaggaagccagctaagcatatacctgtggagggagccaacaaggggcgttctttcatggtttctgtttcaagttccctcagggatgacctggagtgtatgctgaataaatcctttgccctttaagttaaatgtggtcagtgtttaatcacaccagtaagagccagacttggaacggtgcgtatcttaagagacagaacactactggtaataagcccctgtgccttagactactcccacgagttttttagcttccttgtttaatggtcttctcctatgtggttgcatttctgaaacacaagaaatgcatgggagatagctcgggctgttttggatctgctgtctccaatccttgttgagtgcagcaacagttcatctgtatgcgatagtctgcattggtgccttgtcacacatggctttttaatcagctggtggcggacttctgggctctttgcagtgctgatgtctgaaggaaatgcgctatcagaagcggcgctatgttggtctttggattccaccagtggacttagaggtttgttttagattcatcgtcttatttcttccagtttagataaagctgagttctgttgaggcaggtaacgagttcctgtttgttcatgtgtacctgacaatgatgctggactggggaggtggctaagtggttagcgcacttgctgcccaaatgtgagaggcaggtgtttggatgtctataacctatgtaaaagctgcagggcatggcaggtggcccataattccggcatcaaaagacagaaatgtcgagtctctagagcaagctggctagccaggctggacacatagacaagctgtggtttggactgacaaaccctgcctcagtgaaaaggtcagacagagagcaatggagatgattccagacaacaccccggccccctcgtgtaactccttgtcctctgcccccatggcggccgtgaggaggtttgctgcgtgttgaaacagttggatcttaattttgaaactccagttaagtatatgttaaaccttgttagtgtgcctgttggtaacatgtcaatataaatatgtatctgttaattttagtttcatctttctcaagtctgttatcttgcagtaaacactgaatcatttattggaattcatgcatatatgttttcacccacaacttatttaaagtttaccataccaaatgaaaatttaacttcagccattgtacgttttcataactgaaaattaacctttttcacatttgtttggtggtttccatcagatgttattgctttttacattttctgattcttgttacttgatattctgtatactgtgaagtaattgggaggtgcttttctaatttttaaaaattttactttttaagatttgtttttatgcacagttatcttttgcctacatgtgtgtctatgtaccacatgcgtgcctggcatctatggcaccagaggaaggcatcagatcccctggacctgtgttacagggcgttgtgagctgccatgtgggtgctgggaactgaacctgggtcctctgcaagtgtgacaagagctcttaaccgctgagccgtctctccaaccctacttggaaatttctaagaatacttatttcattatatttctgctcatttctgattatgaattcttacgtttcctttacagacacattttcagaacagttttggtttagagagaaattgcacgtgactagcagggggcgctcgtacacttcccgccttgctttattgagggctcactgtctctgcagcacatcctacacacggttctgagaaaatgaatactgtcacccacaacagcacccgtagagtagatccacggcccggacagccccgcacttcacccatccacctcgcgtctcggaggccccggagactctgaggtttcacgttttgcagaatgcagtgtggttgggtcacatgacaacaggcttctttgacttaatgtgtttgtaacgttttctcacatcccatgtagacagactacgcttgtctctgtgatactttgcgtgtgggtgttctactgtttctgagtacatgtccagctaaggatgcctttttggttgtgagatattacagctccttgcttgcagattctgagcttgcgtgtttttatatccagtagacagaagtagatttgaagtagaaagaagaaagttctttccttcctcgggcaattgtagttctccagactgttgccagggggcgctgtcagtctgagcccacagacatcctcagctgctaacctgtctcaagtcaggcatcttgggtttagagcccagaaagttgacactttctcagagcctgggtcctgggctgcagagctaacagtggcctttgccttctggatggtccgttcacagcctgtagattggagccctctggcaatggctcttgcttaggtgatggaaggggcaggagttgtcccagagactggaaatgttgtaaattacgtttatatccagaacctagcttctttgtaggaaggcatgttctcgcagaagttggggcctttagtagggttgttctattgttattacaaaggtgcattctaagtgcaattcctctgaggcctgaatgtaatctacagaagttctgttttgtaacctcattaaatacggactttgggggtctctttatgaatgggaattctagtcccagatcttggagtgggtttttctttctgtacaggagcctaagggggcacccctgagactgtggccagagcaaaagccacgctgcgtgggtgccccttgtccttctgtggctgtttcgctgactcactactgcggtggttccctttgatgtttgtggttctgtggcttctggccagaattttcatctttcttggcagccaggcttgccccagcctcctcccccctccctgtcctgccctccatattaacacttagactctaggacagtcgccagcatgggcgtcagccccgaggggcatcagtgactccaggacttcttaccgctcctaaatttttataaactttcatggtttctatcttcctaccaaaaagaggcatcttaaatattttatctggatgctgtctggaaggggctgctcacattctgtctgacagttgtgagcaatggtcagctcttctgtgttttcatctgtaggtactggtgttggctatgggccatgtggaccacagctgagccccacccctgcccttgagtagagtgtttgtgtttccctggagtagagtcttcctctcagactctctgcccagtgtgctatgggtccctttatccacatgtaacccccttagctggcacacagaggaatttctcatttccattcctaaaatatgaggtctggaatccatctgatactccagatatggcccttgctctgcagaaacggcacctataaaacagtgtgagaaagtccacacacatagcacaggcttgctttgtattcaagaataatgacaacaggactaagtgattcatgttagaaatggctgggaattgggagagttccaaggaaggagaaagcagattccagaaggcttcagaagaatccagacaccccagaaggactaggactaatgcgagaagcactaggagccttttgcacatgaccaggtgtgagcctatgaatgcacagggggaagaggtgatggaaacataggcaaatgggtggacgcagaagcctgaagcacccatgtaaaatgaagtaatttcaggagaagaaagaaagcatgtgagaagcgacagtgctaactcttacacagatgaggccggatggtggcggcacacacctttaatcccagcattcagtaggcagaggcaggcggatctgtgtgagttcgagaccagcctggtctacaagagggagttccaggacagcctccaaagctacagagaaaccctgtcttggaaaacaaaacaaaacaaaacaaaacaaaaaacctcctacacagattaataatctacattgtgagtgaaccagcgtccaaggacgctggtaacatacggatgaaatccatcctggtgtcagtgggaatagcccatagcaggcagcgtgcactctagcaggcggtaatagccagtagcagtcagcatgcactccagcaggcggtgggcataacagtcctttgtgtctctgagtgtcacagaggctgtaaacaaggcctttggtattctggacaaatcagagccatcgggctctcagctgcctaagtgttaagaggcaatagagtgactgctagggtttgtttatttaataaaaaagtcttcaatagccgaaagtttcaattttttatttgtttattttataagtgatactattaaaaatatttacactcctacttttaagcccacttttaagtttagatttcttatcataatctgacagcacaggttctttaagggctgggggaaaacatttcattttaaaaaaaacgaatattggcaaataaatgtttttctctgcgatttatattgaatatattaaatctaaaaagatgcttatgttatttttttcaacctgataaaatgctcgtgcagcctctcatcaaagtaaagcttagcagtgatgaaagtgaacttaattacaaatggcccttcatctgccattcagtgagagatttcaacagaatttaaacaaacaagaattggtaagcatcgctgtaggcaaactgtgaaatacctatctttgtgtccttgggaacttcaaattaccccattgctggaactgatctctaacgatcacagagaaggggacaggttccacacctagtgtctgtcagccatgttcccgagtaccccagcattgcccttatcctctcccaaatgtgtcttctggggcgtgggctctgctggcatccaaaggcttacaggctgggggacagcctgcggcagcatcaacaaatcactaactcatcaccttcaaatatgtgttttctaaatttagaagggagattaagtcaggaaagtgtctctgtgggttaagtcaggattgcccttcctgctctcacctctttatttagtctgtgaagcaggtcacctgggcgtctctgtgttccacagagaaaacccataagggttatttccttgttaattatccccaccatgactttgtttctctgttttttaactatttctttctatgctcctgtgtagtttccagcatttccttttactttaaaacattgtgtgtgtgtgtgagtatgtgtatgagtgtgtgtatgtgtgtgtgagtctgtatctgagaatatgtataagtgtgtgtatatgtgtgtgtatgtgtgtgagtgtgtatatatgtgtgagtctgtatatgagaatgtgtgtgagtatgtgtatgagtgtgtatgtgtgtgtgtatgtgtatgagtgtgtgtgtgtgtgtgagtgtgtatatgtgtgtaagtctgtatatgagaatgtgtgtatgtgtatgtgtgtgtgtgtgtatgtgtatgagtgtgtgtgtgtgtgtgtgtgtgtttgtgtgtgtgtatgtgtgtgtatgtgtgtgtatgctgtctctgcctcctcagtgctgggattacaggcatgctgttgtgcctggcttccagttttttggtaagagaattacttactcactcaatgactttagggctgatattaagcacccattttgttttgtgactaggggaaatatttccttttttcaggtttcctagttaggtctttttaatactcacccagtgtacatctctgtctgttcctttgctctgaatcttttgttgttcttttggtggacgtgtggttcagggaatggaatgaactggacagtatcctcaagggcaaaagtctggttgtctagaagaggggctggcattgtttgggtgtctgtcctgctctttcccaagcttcttcagggacagttgttgacatctttatggtgcggtctgggcattttcatggaggcactccattgtcgatgtgtcctttaaaaagttccagtggggatggagagagcagttccttggaaaccagacccacggagcacatctgtgttgcctctagaggaagggctcaccttctcttgctcatgcttggcttacagtccctcttcctccgagagccacccttatgtgagtcagggatgctttgggctcatcctgaccaccgcagagtgttatccttcagctctgtgaaggctttaacgtgtggatgttttacagtgtaggagagaggcaggtctgacggtatagtacagtgtgctttcgaggcacaagcggactggagtcaggctccaatgtgttgatctgcattatggtgggctttgtgctgtttctaaaatttctagaacagaaaggtttccttgggggactgtcttgtttcaggaggcctgttttgtttaactttttgagcagatgtgtcattattctttattagaaagccctcttttatgctctaatcttgtaaagtacagagatctcggagctagcattggataactatctaataatgaccttctgagtaattgatgatgtcatagctcctccccaggctggagacacgacttaggcctatctgaggtgtccgctggatggttttacaagctgctgattgatttgaaaccctaagaccatttagttgacactgagctgatctggctgctttggccagagtttgggtttagatgaatttggagtctctaccctgccaactgtcaacctctggagcccatccgggaaccacgtaggaggtgtagactatgaagaactgtctgagggtgaactgactataaatgggagaagataatcttaagacagttgagcacacaagctccagagactgagaggatccctcctaaggttacgaccctccctatcttgagctcagagacccagcccctcagttgtctgtgctgttgcctcatgagctttgaaggtgattttgtagttcacatgagcagatgaaacattagtgaaattactggatgtcttagttaggtgtttatttctatgaagagacagcatgaccacagcaactcttataaagaaaacatttaactggggaggctcgcttacagtttcagaggttcagtccattttatcatcatgacggagaacacggtggcgtgcaggcagggatggtgctggagctgagagtgctacattttgtagacaacaggaggtcgactgacagacacactgagggaagtttgagcaaaagaggccttaaagtctgccccaacagtgacatacttcctccaacaaggccacacctcctactagtgccaatccctttgggggccattttcgttcaaaacatcacatgagggatgtctacacagcattcagctttaataatgacacaggaggccctagaacagccttgaagaaagccaaagccacacgacttcatattattacttcttatcatttgttttctgtggagatgtatttgccctcttagaaaggtgtgtgtgtgtgtgtgtgtgtgtgtgtgtgtgtgtgtgtgtgtgtgtgtgtgcgctcgcgcacgtgtgtgtgtgtgtatgcttttttttcacatgcttgcatgtgtatacggtttttaatttgagttaacagggtattgataaatgtcccttatggcaaaaggtttatgacaaacttcctgcaggtgattgatgtatgttctagttgatggctttcatccagcatggaagcccagaagcaataagagtctacaaacccagcagttgtcttgtgtgttttgtcttgggcgaaatctcagaaccgtgtaaggacagaattttcagcttgagtttgcagggctagagacaaaggtctgggctcaaacaaagagagacacaaacaggacttgtcagtaagggaggaacagacagtaaatccgacttctctgcttgtttaccaggtatttaaggtccctcttatgttgattttcccaagattccaaggaatctagagcagtgattctcaacctgtggtctgcagcccctttggggccaaatgaccctttcacaggggtcgcctaaaaccactggaaaaacacagatatttacactacaattcacaacagtagcaaaactgtagttaataagtggcaacaaaatattttatggtttggtgtcaccatcacacgaagaactgtattaaagggtcgcagctttaggaaggttgagaaccactggtctagaaggttgacgaatccagctgccgtttcctggaaacagggtggctctttagtctgatacaggaaatgtggtgacctggtgcagtgtgcagctgcttaaactggctgtggggcactcccaccactcggggtgagtcaaggagatcagttcacggtcatctttgtctaattaggaggtttgggccaacctgggatacacgaaatcctgtgtaaaacaaacagaagactatcaatcaaacatattccttgtatttcctgaagcccaaggaaaaggaaggtgtccagggcacaccttttgttacttcgtcagagggatggagagacaaggaaatgtggggaaggaatttgggtctgggtttagaacccagaagcaagctatctgcccgctgtgcggcacacagcctcatgagtctattgtggatcctggaccaagccctcaagtagccttacacatctttgagggaagcaggaattcctcaagattccacaatgggccacagtgatgttacttgcaaggccaggtgtatttatctgcagattttactcattctgtaatctgccagacattgtcctaggtagctggcattgcccttaacgatggagacaaagtgtctcatggcccacaggagttatctttcagttatctgaaatgtgtgtgcaggggtggtggtgaggggacattaattctgagtgtcaactaaactgaaattggattgactgacaaaacctgaaagatgggccattactgttcccccatatggcctgtaggagtgtggggcgggaaatggacatttgccgtcagaattagggataagactggctggtcagtggtgttcctcattgtgtggctccttcaagaggaggctttggacacggcggtgagcgggaggcgtggcctgctgggccaatctgtggagggtcagctcctgaaagtggtgggatggaacgaggagaaggtttccaatagatggtcttagttctcagctgtgggtgcctcatggctctacgtgttaggatctggaaagttctgtttttaaaagccagaagcaaaaaaataaaaataaaaaaaaataaataaaaaagctggaagcctcctgcttagattttagatgctggattactaatgccagtgcattctctctgtcttcctccctccctctccccgcctgtcgagtgcacacacacacacacacacacacacacgcacgcacgcacgcacgcacgcacgcacgcacgcactcacgcacgcgcgcacacacacacactcttttttaaggaaaagagaaaaagaactgtgatgaactgttttgagcagcactctctcttccgggaagactgttcctgctctgtttctgagctcctggcttatagtctgaatatgtagtgtgtgattgcagtccctttaaccctgtgagatcagctagctttgaatgctcacctagaagaaataagtttaggtcgtgtagttgacggtaccatattagtcctttgtgacagttgtcaaaatgtcatttggatttgtgctgtaagcatggcgccgccccccaacctgcccaggcctactcagctctggggttttacgtaactaattctcctacactgtagttttccagtattttgtcattagaataagttcagggctttgtggatttgatcactgacctgggtttaatgttgtgtaggatataatgaacaccatcaatttctgatcctagggatgtaaaaccttgaaacatctttttaaagcctgttaataataataataataataataataataataataataataatacaaactgcccttacacactgcataagtttgcatatttctgaatctttatccctgccttggaattatccagatattctgtgggttgatgtttttgttcagcttgcttacactgacttattttcagaaattaaaaaggattgtttattgaattctccagtgttcccgccttttgttgactcctggcatctttaaattaaagtaattattcttcataatttcttcagagagctgagcatttttttgtctcttcccttgggttgaaccaaagagcataattatcgtaatgccgtggccagtgttactttccttttaatggtgctaggattcaaacccaggaccatgtacgttccaggcaagggctctgccaatgggctatatccccagcccaaggctgctattttaaaagcaagatggctttctcctgaggtcgttgtctgccaggctttgctgcttgtttttgctgttttctttaatgttggcagactccgcgtgaggagctctgctagccttgagacttgctctcaggttaagatcttgatattggttcatcagagctgttcttcctggtgaaatggccttatgaaaatacgggccccacttctgtgattcgaagagggagtctagtgttttgttttgtttttgttttttgagatagggtaccaagtagcccaggcttgcctcaatctcgtgattttgcactcagattcccctgtttctagtgcgctgagattataggaggcccagtttagaaaaaacaaacaaacaaaaaaaaacatttggttacaattctagaatttgaaacctttgcttctcaccggtgaatcctttttgataggaactggaaattctccggctggagtctagctgagtatcctacggagctggttacctgtgggctgcaccaacctccccaacaaggcagggttagcactagtctcttcttagactcttgtctggccgacagtgtctcacttgtcccccttctgtacctggggtggaggctgtgctgccctcagctccccctcgagccatggtgacagctgacagaccagctcccatccgcctttctaaaccctaaaggcttccagtgtccgtctctcccatcattggtgaccccagttgttctgagtcggagacggatgctggagagggagagggaggttaaatgtggggcacagttgcctctccagtgggagaagtgtctgtgactcaagtctgctggggcaagcagtaactctcaatgacctcaacctgcccacacttttttatacggtgagaggtcgcagagggttgagcctgctcatgtctcggaaacaaagggggcatgaagtagggagaggatttggggagatggtgttcccgaaacccatgactccaaaggccagttctcggaggcacagacacaagagagccttctgggtagtgatgatactggggtggtgtttacaggggttttcatgcttggcaatggcagacgagtttcagaccaggagagcagggacagtatttaccaggaaggacctgaagaagaaacgccaagctgatgacaggtgccagcttcagatggaccgcacccttctgtggctcagagcccttcgctggcttcctttgactaacagggaaagcatttgctttaactcctcaagttgagttaattttttaattgctcctgagcttgggacaaacaaaacacaatgtcaattttcctcatgcacctctgttgctttttcctgagcttagatggcagcccccactaaacaagggagccccacactaccaacatgcaggaggttagagtgtttttgatgcaacttgaacttgacattgatcccaggtgcggttctgtgcaggctgtaaacagttcttaccactttccgtgcatattccagatgctcttcccgtggtacctctgatttctctggaaactctgccccaccgcctataaggcacccctcatactcagctagctagtgttcatcttgaagacctcagcttaaacttgggctcctctagtcacgctgcctgaggctgaggctgctcttttcctctccttggattgcaagtcttactcggttcacacctctgatttctcatttcagggttcctgaggtggctgcaggatcttttatttctctcagaggagctcacagtaggctagtgtaggcacatagtgagacttacaaacgttttatgggaaaacattgctaataggtactttttatatggcaattccaatagctgatatttaaagtgtgtacatgtcctggatttctttctgaatgtgatgtagcagatagtggttattgaaattacttattttcggtgtctcagaattgtccataagtcttacgagtgcagtaatttgaaatattattttttaatttaatttctattttttctttcttcattttcctgcacacacttgatctgctccaagtttgactcttacggatgtcatggtaaccgggcacagcatcctggggttaagttggccttttcttccctgacatgtatctcaatgccgtgatgtgcttgctcctttgttcatcatttccttacatcttgtctttggtgatagaattatgactggtgtgcccttgattttaactgtttcccctcctgaaaatataaacccatggtatgtctgcagcacacatagatttgtaaactagcaatatgtccaacagccctttatttttaattttcactaattaatgctcagcaatgctactcatctatttatcgtgtaacttggtttttatgaggttatggtagtgtgcatgtttccctcaagctgagaaaattttgatgcaccaatcaaagctcaaacaacaattttaaataaaaccacttggccatcactaagccacgctgagggttggactttctagaagtctagttgcctttatgtcagccatgcttctgtaaggaaccctaataaactcattggttcgccaaaaaataaaataaaataaaatcactacaaattttatttttattgtaagagtggtaagttattacaaacatataacacatatgttctcttcaggaatccaacctcttgagtccggtgcaggatggcgtgaagacgccgcaaattgacagcaacaaaggcaacaactaccggatcgtcaaggaggtcagcagccggggtgcggtctctctgcgtgtgcacacaggggttgtttttgttcaggtgcatgttacatggctgtgtctaatgcagcacttcatctcgttaaagatcttgatcaggctgagtaagctctgcgtgcagaacaagaagtgtcgcaaccaacaccagcgactgctgaagaacatgggggctcacgcggtggtgctggaccttctgcagatcccctacgaaaaggtttgccctgtcccgccttccttcagatctgtgttactgaaaatgtatcaacaagtttaaagaatttttctctccttaattgtttaagaggacaacccctaccccagtgtccttggattcttttctgtgtttcccacacacaagggtgtgcttttgtgaaacctgcttccaccttgtaaattaggaagaagcacgatacaccatcacctaatccaacacagcgcgcaggtttcttccatagttccagccatgtccggttgagaaaagcatctgctttaggagcacgctaactccgggcttggttgttctgtctgctctctctcagtcctgatctctcttgtagactgacagttattctggagagcgtccctcacttcctcctttgctcaggttccatttatcttcggtgggaacatggaaggattctagtttctgtgccgagcttcctagcaggcacatgaggctctgatttgttcccacacgagtgatggatgcgtctgctggtttgtccactgtaaggacctccctctccctttgtaataactaactattctttcctgaggttccattgagaataccccgtccttcatccagcctttaattcacattttttgctagcatgggcatgggtgggtaattggaaagtctggaggaaagatggagagggtgggaggaacggagcagacaggcaggaagaataaagagaaggagagaacggtctagaaaggaagggacagagccacagagggcgtggagaaaggagagcatgaacagagccaggaggcggcatgcttggtggagggaggtggttttgtgtaagcctgtcctccgttctcggtgtcacgtgctgccctttcgcctgcagaacgatgagaagatgaacgaggtgatggaattagcccacgccttcctgcagaacttctgccgggggaacccacagaatcaagttctccttcacaaacatctcaacctgttcctgactcctggagtaagtaccgtggcggcccctaacacttacggcaggcagagcgcgtacagcatttactgctctgtgaaaaactttgttgacctttgcacatcgttcttccctggagattcactccataaacttgagtgtttccgtagaagaaactcttaattagaaaatttagacaaatttcatctgcaaacggtggtttcatttacgacatgcgattcaatgttagaataaggattttagaaagcttagtgcttttttcatgataccatgatgaagctaaatatggaagctggggttgtagctcagtaatggacagcttgtctagcgtgttcaggacctagcaccacaaaacccgaaccgaaaacaaactcacaggagctagatgctgaatattccaaggttgcgttgactatgaccagctgaaagcctgggggcagatcttggggctgaagaagagcatttctgtggaaacgtgaggacctgggttcagatccccagtgcccacatagaagccagacacggcctcgtgtgcccgtaatatcggtgtggacggcagagacaggagaactggaggagcctgctggccggtcagtgtaattgggataggtctcaggttcagtgagagactctgcctcaagggaataagaaggacagtgacagaggagtgcgccgatcctgctgtggtctctgcatgtgcatgtccatacatgtacagcacgtgtacctgtgagcacatatacgtgtgcacacagcacacatgcttataccatactctcacaaaaggataaaaaactagcagatctttagagccaagttggaataacgaataagctgccctcaagtcgctgacagtgcacttgctaatttcctctctccagctgagtcccattgtgaggcagatgtctgtctgtccttcagtggttcatgactcatggtgtctcacccaggacaggcactggccactcatggtggcttcacttaggacaccaggcccatggcagtcagggaacataggccctgtagaaccctggccccgcccagtcacgcaggtgcgccctctctgctcagctcctggaagcagaaaccatgcgacacatcttcatgaacaactatcacctgtgcaacgagatcagcgagagggtcgtccagcactttgtgcactgtattgagacgcacggccgccacgtggagtacctgcggttcctgcagacgatcgtgaaagcagatggcaaatacgtgaagaaatgccaggacatggtaatgaccgaggtaggtttgtgcctggacccgcgtcgccagcttgtagcgggaaagacctccggagccatctgggtttactgtgactgctgaggcacccacaggtttacactggtgcagtgcagtgactcagggccatctgacctcacggtcttattaagagtttttctttttgatctgtaacggaattggatccgttacataatgggtcatttttaaatttgaaaaatcgtgtgtgtgtgtgtgtgtgtgtgtgtgtgtgtgtgtgtgtctgtgtgcgtgcgtgtgtgtgtgtgtgtgtgtgtgtgtgtgtatgcctacacatgtaggcaatcatagctattaatttcctatttaagttttcttgtatcccatatattttgagatattatcttttattttcttttgtttctgggaattattttattagttgcatcaatgacaaattcatcatttaatagtatgtcatacaatatctattaagtttcatcggatatctgttaagtccctttgatcaatggtatcattgaattcagctgttaaattactctttttatttttgtttaaatgacctatcagttagtgagggtgaagtgttgatctcacacaatattcttgtgttgggataattgagtttgtttcatacaattagatgcacatatattcagagaatatgtgtttataattataacataatgataattgattgctcacttaatgagtataaaatgaccttctttattctttcccattaattttatcataagtctgttttgtcggatgtgggaacatcagcacgtgtttgtctcctaggttgatttgctagagaagtattttccattcttcacccgagtttagtagttgtgttttatcaagaggtgtatttcttggaggcaacaaattcatggttcctgatttttatacactttattactctgttaaaaattgtgtgtgtatgcatatgtgtctgtatgtgtgtatgtgtgcatgtctctaatgtgtgcatgtgagcatgtgtgcatgcctttgtgtgcatgcctctatgtgcatgtaagcatgtgtgcatgcctctgtgtgcatgtaagcatgtgtgtgttgtgcatgtctctaatgtgtgcatgtgaggatgtgtgcatgtcttgtgtgcatgcctctgtgtgcatgtaagcatgtgtgcatgtctctgtgtgcatgcctctgtgtgaatgtaatcatgtaagcatgtgtgcatgtctctgtgtgcatgtgtgcatgtcactaatgtgtgcatgtaagcatgtgcatgtatgcatgcgtgcatgtaagcgtgtctgcatgtctctgtgtgcatgtctctgtgtgcatgtaagcatgtgttcatgtctctgtgtgcctgtgtgcatgtctgtttgtgcaccatgtgtatgtatgtgcctgtggagaccagtagagggagttagatcccctggagatggagcaacacctatttataacctgcttgatatgggtgctgggacttgagcctgggttttctgcaagagccacaagtgctcttaaccattgagccacctctccagctcctacaatgggtgaaatcttaggagatcacaaggttatttggaattaacacaatttttctatttaaaaattcctctttctgaatgataggacaggtactctctgccactgtttgtaatagttttgaggaacagcgcatgagttaataagtgattgacagggctctattagagcagtaggaactgggtattttgaatgaggtaagaacttaggaaagtgagctaactgctttggaaaggttgatgtgggttagctgctcactagggacacaaaggtggccctttggagaactggtgactagatgcaggctggtggcctgtgcatcagagcagctccacccacagctgcaaggaagctgttacccgggggatcgcgttggtctggggaaatttccatcgccacatgcctttcagttagaagtgagagatgtctgatgtctctgtgttgatttcatatgtcacccagaaatcttaaaatgcaatgcagcctaagacgataaacttttacaaatgacctgtaaataaacaatgaaaagcgcactgtgaagcaaatacgtaggcccttcctttggcacctatcaaaggaaatgcttctgtgtataaggaaatcgttgtaatattatgcataagcatatttggatacataaattcctttgcaacaggactgtcaaagtcagccaatcagttaattggctcattgatttaaatgttaccaatttaaatatagtaactaaattgaaatttacatatcatccataacctgaccaaatatttcctatcaggcttagaaaattggtgtcagtaatagataatagcatggtaaataaaatttgctgccatcttgagcgctaaaagcatacaacaaaatatgaggagcattcattcatgtcccaagtgtaccactcaacattcatgtccaagtgtaccccgcttgtcatctcagctgttctactctccgatgccctcccataaaatgaggacatttccaggtattcatacagttgtaagtacttgaagcaatgtgtaagtttgcttacttactaatgcgaatgcttttctatgattcatttcatttttaatgtgtatagaagtgtgtcagtctgtgggtttgtgcacgtgagtgcactgcctgaagaggccagaagagggcgtcagatcctctggtcctctgcaggagcaggggcttctctgtctttccagtccttcactttactactttatagaaaacagactcaggaactcagacgttcgcttccctagtgctggggttacaggtctgcacccccaggactggctcagtgctgtttggttcttatcccatctgctggtctcatatccccggcccagttttggcagcatcagtcaccagtcacttggcatttgacctttctctcctcctacccgaggaagctctgcttttgcagtgtgtgtgtgtgtgtgtgtgtgtgtgtgtgtgtgtgtgtgtgtgtgtgcgcgtgcttgtttgtgtttgtatgtgtgtgtgtgtgtgtgtgtgtgtgtgtccgcgtgcttgtttctgtttgtaaacagatctgtgtgtcgtcaggtaggtcgaaactcttagaaatgtcgaaatctgctatgcggcctcttttcttcacttcagttgatcaacgggggtgaagatgtgctgatattttacaacgacagagcatcatttcccatcctcctcaacatgatgtgctcagagagagcccgcggggatgagagcggccccctagcctaccacatcacccttgtggagttgctggcagcctgtacggaggggaagaacgtctacaccgaaatcaagtgcaattctctcttgcctctggacgacatcgtgagggtggtgacccatgacgactgtatccctgaggtcagcccgacaaacgcttatcacgtgtagaatgctcctgtctttaaagctcacctgggtgttgggcgtctcccatggtaatagttatgatgacaccacatatttagtagagggattattggtcatgtaattttcaaagtggaaaagagcacaaagactttgagctttgtttgcacagaaggaagacaggccccttgactaacaactacaaatgtctcgtaaggtagtgggttttcagggaaaggttcacttgtagttttgagtgtgaacccggtagctcattggtgagtcagtcattggtgagagagcctaggccggtgctgcagggacccaccatagatccatggctttacctggctgcacagagtatgagtcttctcgagagcatgccacaccctctctcagcctctcttctacctcagctttgacaactggggaaaaatacctggcagagagtgattatcggctgaggaaacccggattgtcagtgaggcttccaggaacacacagtgtaatgatttctttcttttccgctgttatggtatgtcacgacaagttcataaatatgtgctatacactaaaggacataaaatcaaaaggggtcagggaaggtctcagtccctattccggtcaccttgggccatgacaacacagtcaagaacctgaaggagtatttatgtggaaccattagcatctcagtcccagggtccttcctgctttggtggggctgagatggcacagcagagaagggtggagtggaggagaggaccgtgggctcagtctttatccgaggtcctggtctttccatgccagaccccgtgttcagttcctgcttggggtcccgcctttcctgtgttcatttcatgctttacttcttcagagaagagtcctctggctatgcagatacggccacccacatctccaatggagaactggccagttgactttcattaaacctcatgccttcctccaagagggtcggctctaggagggtaatggccatgtatggttcacaattatcatttgggtacctcagtcagagcagatgccagcaaatgtgtctccagcaacttcaacagtgagtcagggtttttatccaatgttctttaactgtgttgttgactcccacagtcaccaacacttccagcatccacagttttaaagtaaaacagtcactgcatctgcttaataggattgagagagattttgttcaattagaggagacatggggacggcccaagggcttcatgcctggtggacaatgagtaggtgcagctgctttggagatgatggtgtctcagctcatcctagcccatggccagtctcaacacggcacacgccattgaggattgttttctagacgccagtggagccgcaggaagcccggtaggcaggaaagctcgtcctttttcctcatggctctgtctcagagtcccggaatcccatggaatgactgacatgatttgtttctatgtacagccttctctcggagacatttgagctcttcctagtgtctcaaggacgctaggtttgctctgagttaagctcttgttttcacagcagtctctgggtgtgggggaatggaatgatggaccacaggcttccctggaccagggtggaatagctgttaaagggaagagagcagggagcctgcacatgtccaaaacaaaccgtgatctgctacaggagcccgcaagacggcatttcatgttgtagaatggaaggcggtgggtgaaaaattgaacttgcttttgcgtttgaaactcacacaggtgaagattgcatatgtgaacttcgtcaatcactgttatgttgacacggaagtggagatgaaagaaatctatacaagtaaccacatttggaagttatttgaaaacttcttggtggatatggcaagggtaagttaaacgctcttcgtggggtaagatcatcggtattgattggtactgattttgattaagcagtaaatgtctagatgaaaaatttgcagttaaaccaactacatttcgatctagtctgttttatccatgaagttgtgaatgagctccaggagatcgcgagcgacattgttactgtaaacagaacacctaacttggcgtgggccgtgacaggtgacagtttacatttataaatgacagcatttgtctgttactaaagggaattgtaggagccttgctacatgggttggaggagacatttggcagaggccattttctagttaaccttttgccgagaaggcaattaaagccacagatggaggaggcctcaagtggttcagggaggaccgtgagcagacttctcatgatccctgttacagtcttccctggctctgataatttggtcatctggacttttcatgaatgttccctagatcacattctgcctttactttgagtctgtttccttttttttttaaaattgggaggtggcatgtggcaataggtatcattttatagatacgtctgccttgagtgttttctctgggaaaatgtgtaagcaacaaggaagggatgctgtttactcttttgtgctgtctcttttgcataacaaatcattattagcaccaggggctttatatatatattttttcaaacaaggcttcattccatagtgcaggtgggcctggagtaactccaggcgagcctcaaactcacagctatcatcctgcctcagccccataagtattgggaatacaggtgtgagccaccataccaggctctctcatttgagttttaagagcgacaagatgtgaagtttgaataaggatttttctaggaaaggcagaatatccacagctccttagacctggtacaaattaaggtgacctgcgcagtcccttaggccgtcctgccccctgcagccctagtagcttatgcaggcctaaacttgttagaggctggggattcccagaatcttacaagtacgattgctaccgtatctggtagttggtggcctcccttgcactctttctggaggaggggagatgaaatccatacgctagagctcccaccgtaaacccgggcagccaagaacaaccctggacgaaaaggtggatcatgtgttcttcctagttagtcaagcatttccagaggaaatgtgttcgttttatttttggtgtggtagagtgatcttcactaggttcaagtacaggcatagttagtcccttcccgttttacatcatctttgtgtgaccagcaagaagtcacttcgtccttcctttctgggctaaatcacagctaggtcttccacacttagctcacaccattaccgttgctgttgccactgacatgaggaaagtgcagctctcaccagctgtgggcagctcccgaggagtccttgaagcgaagggtaaattcaggggctccactggtgcaggaggatgttaaagaccttccaggtggatgggcatgaatcttcggagttccctggtgcctgtgactgagataagctggagagagagagagcaaggtcacactctcagaagttgtcagctgtcacgctaacatggagctaattttcttaaaactaaagagagctagtggtggctgcctgacccagctactcctgcacccacgcaatctttccacttaggaattcagagactgtgcaccttttgttttcctgagtttgcttaagtggctgattatgaagtattgcttattacatgaaggctccactctgggaggcttcctggaattcctgcctgtctgctcaggttgactgctgacgcctttgttcacctcagcttctttttttgtccttcaaagcagagcttctccagggtagacatgaaaccacctggcattttccagaagaggaaacccagggcacagggtcccttcctctctcttcaggaagtttccacattctagtaacaaaacaacccaggtggccttctgcgcagctttccatacagatggctgagccccgctccccagggtctcagactcggcacttgggagataagacgtttgaaacaagtcttatgtggcaccacggttggtcctggggtgacccaagagccactgcagtgggatctggaagggatgtcaaaggaatcagtcagactggggttcagatccaaactctgtctttccctgactgccttacatatactgggaaaggcactgtaaccctggttgccttacaataaatacattttcccaggggccctgggaagagccggtgaggtaacacacaataaattcttagcgcatcctgctctttgcaaaagccttggtggcattatgtcattaccaggattatcacaaggctgtgagaagccttttgggcagtttcaggagcttctccgagtcctaagtgatattgatgacataatgacattgagagaggcaaaaacagactgttcatacaggcgagagccagaccttgtgttcatgcaaccagacaaacattacttgggcttgcatgatgctaaacatgcatgaagccaggcgtgcatatagccagacctgacagatactatgcatgaagctgggcatgaattaagctggaagctgaaaaatgcatgaagccaggtatgcatgtatcaaggcatgcatgaagccaagcatgtatgaagccaggcatgcagggtagtagaatgtgaatgaagccagctacacatgagatcggacgtgaattaagctggaagctgaaattgcatgaaatcaggtatctcagagtttctattgctgcgaagagatgacatgccacagcaactcttttttttaaatattattattattttagaggcactcatatttacatatccatccccccattccctcgccctcccatccaatgttccccaccaacacccaacccaccccccacctcctccccagagatagtgaggtcctccacaggggaccttcaagtctgtcatatcattcggggagggcctagaccctccttcctgtatctgggctgcaatagtatccctccatagggaatgggcttccaacgcccatttgtgctctagggataaacactggctccactgttggaggtcccatagacttggcctcctagctggcacccacattcagagggcttggtttggtccaatgctgtttccccggctttacgactagggtctgcatgctctcactaggtcaggtcagctgtttctgtgggtttctccagccctgtcttggctcctttgctcatcttcctccctctctgcaactggattccaggagtatggttcagtgcttagctgtgggtgcctgcttctgtttcgatcaactattggatgaatgttctaggaatgttaaccaaggtagacatcaatttcatcataggggaagggcatcaaaggcagcctcttcaccactgcctaaattcttagttggggtcatccctgtggatcccctaacatttcccctgtgccagacctctcttcaaacctgtactgtctccctctatcaaggcatctcccttcttgccctcctctattcctcccccatctcagtcctcttgttctcctcccccaccccttctccctttcccacctcctttctctcccccctcctgtgctcccaatttgcttaagggttcttgtccccctccccttcttcaagggactatgcaatcttctcgtggggtcctccttgtttcctagctcctcaggcagtgtggattgtaggctggtgatccttagctctatgtctaaaaatcatatatgaggtggagggaggaggccacagcaactcttatacaggaaaacatttaattgggggcagcttacagttcagaaagtcagtccattatcatcgtggcagagagcatggaccacttaggcagacatggtgctggagaaggagccacgagttcttcatccagatcagtaggcagcaggaagagaaagtgacactgggcctggttgagcatctgaaacctcaaagcccacccctcagtgacacacttcctccaacaaggctgcaccaaccccatcaaggccacacctcctaacagtaccattccctacgaccaatggaggcctcattcaaaccaccacaccaggtgtgcaagaagccaggcatgcatggattcaggtctgtgtgaagccgtgtgcagacatcacttgatacaaactgctgtcaaggaaaagcatcagactcaggtgtgaacagcaaactcctaaaaccccggagccattgattgccatcagagagaaggagctggtgaagagttggtgctggaagctgggttgagggcacccaacatggcaggggtgaaagaggagagctcatggctggtgtccagtcttagttttcagcatctatttctaaaatgatgccattcctatgtttagcatgctttggtttttatttctacacaacttaaaatgtaaagattctcacactgactccaagttttctttattatagcttttaccctgattttacctgagcagcaacatggggcagtccagtcaagcaaaggtgtaacatataccacgagtcaccagtcctccttgccaggcctactttgaaactataaagctgtgaaacttagaaaacttctaggtggcctcataattttgctcctggagtccagatgcataattttcagctgacaccctgccccctgcttgttatagcccagaaaggaaggcttccatcccaacccccagctccagcagcttctcaaagttagccttcgtgtctgccagtgttttgcccatgccctatactggtcctcttttgggctgtgtccaatgttctgtttccatatctttggattctccgtagcctgcctgagcctgcacaattgtatttcggtagaaactcggagaagagtttatctaaaaagacaaatgaagtctcaaagctagcagccatgcggcatctgcttccttcccacacttttctgtagtcatcactaccaggtcttggggttctcagaaagccgtctggagtcactactgtttgtgtcttccattttcctcttcatggcctttatccctcataaggggcaagcacccacaggagtggtccagtgggtaaaggagagggcttcagtgggtaaaggagcttgctgccaagtttgagcctgggaacacatgtggtagaaggagactccggcaaagctgtttaataaatgtaaaaatgatttttgaaagacacacagaaaatctttcctgaaaaatagcttttaataagctcgctgtgttatattgtctcatgtggtcatccttctgatgtcccgacagagacggggcccacgagctgtaaaacagcacaccggggcagtgaccaagtcattagacccagaagaagttgttgcttcctttcagaccgttaatggcggcccactttgatctatgttctaatgcagctgaaacctgtgcgtgtggggcagaaatggttttcttcgtcttggtaactgcttgttgttgcagtcaggggactcgggccattatcaggaggccacctagaaggggtgggtgatgattggtgttagtctcagactgtaggtgtaattttttgaagatgtttccgccttggctatccctttggagaccttacggccaccagctgtattctgagtaatgttccgacagaacaaaattagaccaagaaataatataggatgtgtgtccactgagtgtcatatcagtcatcgattaacaagacagaccaggataccgtgttttcagtagattgcttgggccattcgctccctttcctgccaagcagaagtttggagatggggagaatatgtgtctgccataaaactgcttctgcgtggtctttgttagacaggactaagcagatgtgctatgattttgttgatttttttgtttgtttgtttttggtttttcgagacagggtttctctgtgtagctttggagcctatcctggcactcgctctgtagaccaggctggcctcgaactcacagagatctgcctgcctctgcctcccaagtgttgggattaaaggtgtgggtcaccaaccaatgtccggcaattttgtaaaaagttgaatggacattaataagattcacttgaaagtgttctttttatgtggcccaagaagctatcgtggcagggactggagacgtgtcttctgtagattttgccctctctgtggcacctttcgctcagcggtaactttgcagacccagttttatgttgtttctcgtccttccccgaatgctttgtgcttcatgtggtcggcagtatccattctagtccatcagttctaaccccctcccccaagtgtgcatctgttcatgtgtgcaggggtgtgtgtaatggctgtgtggagggtagaggtcaacctggggtgtcattcttcagaggttctatccatcttagttttagggacagggtttctcactgagtctatcaccagccagtgaacaagcacctccctgtttctgcctccagcactggtttcatgtgtgtgccaccataccaagctgatttttttctcatttttaagatgtattctgaggcttgaacttagtaaggcaagcttgtaaggtaagcactttactgatcgagctccttaaatcctttatctgtgttcctggagtcacctgtctgtctgtctgtctgtctgtctgtctgtctgtctgtctgtctgtcgatgtgtctttcaccttattggccactcccctgccacttgactgatctctcggtatcttcccacttccagatattgaggtatggcagactcaaaccctggacctggtcccttcactgtctgtaggcacttgcttcctgggatcagcaactctcaaatattgatcccaggttgactgaagcccaagtccttctctgatgtcgagtcttgagtctagatgtttacctgacgtttccatttatctgtgtgccccttctcaagttgtgggcagttccagcgctcccactttgcatccagacagacatcctggcatcatttgcaaatcgtactttgtaccccctgaatctgatccttcaccaaggctgtgggttctaaaatgccattaatttggccagttctgaactcttatgtcatatctgtccacatctggagggagaagaggaggaggagggtgtgtgtgtgtgtgtgtggggggggggttggatcaggtccctgcttccctgagattgtccgagactttccaccttttctgtgccttccttccccatgtcttcctagcctcctgctctccttgcagctggctctctgtcctgttgacagtggtctctgttctgtttctctgggcactttcatgccagcatctctgccttctgagaggcttggcccagaatctgcatgcctgtccttcctctactgtcagatactggtttagttatttttgttttttgtctccatgggcaatatctggcataaagcacttagaagaggatttattttagctcacagctttggaggttcatccattacagttgggagggcttgtggaggaagcagctgtccaccttatgacagataagtcatggaagcagggcaagaaaaaagagaggacaagaaataaccccaggtgacctatgtcctcctgttgggtcctgcttgctactgccaactacaaatagacctttggatggattttttttggatggatattttatattcaaagtttaacatgcctttcatgcccacctcacaacacaagataccctcaatccatccctgagagtttccatggcattaacagttccaatgtcactccagagtccaaactcagagttttctctgaggcccaaggaaggactcttagctgtgagcctgtgtggaatcaatgttgcatacttccacagtgaaatagagcatatacttccattccataaggttgggataggagcagcaaggaaggagcctaccaaagcaagactgagacacagcagggcaagcattgaattctgtagctgtgtatctggttcagggcaagcggtagtgtgctgtggattcccagggtggggaggccccacccatatagctttgccattttagcccatgtgcctgtgacctgctcagcagatgctcctggtattgctaatgtccttgggtgtctagagaggcttaggtttcatcctcagctccacacattgccatttcaggacccgcctgtagagaccctccctttattcccagtgtagcctgccttcccaggctttctttgaaatctgggtggaaggccctcagctctgtaacttttatattcttcatgctcacaaaattggcaccatatgtttgtggtcaggacctgacaccagattgagcaatagctgggggaatgtggattgtgagtacagtggcctcctagtgcctggatgtctgggtgtggtaaaagctttgttgatctgtactgcagggcccgggtatctaggcttagctgtgctgatcagtacggcagggttggggtttggtgggtttgagttgcttatgcataacagaacacatgactgggatggctacatgaaaaatgtccagtcctgtaaacaatgtgtgttagttgacacaaacctagacatatctatatatctagggactcttaattgagcaaatgcctccaggagagcagcctgtaggcgtgtctctggggcattctctgattagtgattgatggaggagggcccagttcaccgtgattggtgtcacctgtggcctggtagtcctgagctgtataagaaagcaggctgagcaagccatggagagaaggccagtaagcagcagcacatccctccatggcctctgcttcagttcctgcctccaggtccctgctttgagttccaccctgacctctgttagtaatggactgtgatctacaatgtgaaataagccctgtcctccccaagttgcttttggtcgtggtctttatcacagagatggaaagcaaaccaaggagcagtgcaagatacatgaaataaagtaattttaggtattattaaattgacagaaataattataacctgcaggtatagtagttaattccagtgagaaacacaagactcattctagaggtgtgggtgggtcaaaaggtgtgagaagggctaggtgagcactcgggaggctaggtgagcactcgggaggctaggtcagatatggctgtgaagcagagacttcctggagcaggtgactcattcactgacatctgggcactgaggttaaaagccccacccactttctgtcttttctctgcttcctgattggtcaaggtgtgtcaagcccaggctgcacaggtctgcccatctgctgtcacctctcatacataaaaaggtcatttgttgtgatgtcattttgagccacttccaacctttgctcttattaaagaggcaataacagtaaattttaagactggataaagaacacactattagttttttttctgttttattttgtttcctggtaagtttttcacggttgtaacaataaaagagtcttcctccatttagtgactaccctcagtaggaccagtgtaggatgtaaagtgaggatgctttcattcaagcttggataggaataggtccccgtggtttgggaaacaggcttttcattacccaggatttgagtacagcctcatctaggtaacttccgttactctactcactggtgttttgccagtgtctagttccaagcagtgcagcacgatgtacagtaagtccagtgtgagattccatcccccactgcatgggcaaaggtcctgcaggctgatggtggagcgcgagcgctggtctgccacctgctcaacaaaagggcagttttagccatgaggaatattcagtgtttggaagaggcagaaagaagtaaaatcctaagtgatgcttgtcctggacaaatcagcttgataggagttctgggaccatgtttgattttaatccccagtgtaatgcacaaatacagccaaacctaaagttaagtagacggaagtaagagtcatatatgggacttacttacctcagagacttcctcagtggtcatctctcatacagagtttctcgtcatgtcgtcacttgtcggaagctcaaaaataagagatggagattccagaaatgttagtgacgtcacagctctgtgtcacctctccacagtcactgcagtggctgtgtctaggtgatcctcgatttactcaatcagagacccaaatagagtggtggtgatggaagctcatgtgtgccaaagatctgtgtggtgcttcttgtaagtgaaaagatgaatggaatgagagagagagagagagagagagagagagagagagagagagagagagagagaagaaagataggagagaagaaaacattcacttacattcactcatattgtaatataattttaaaatttatgttattaatctatttctgggccacatttgtgaattaaattttgtcatatatatatatatacatatatacagatatatatgtatatatatatgataaaaacatttataggatttggtacttgttctgcagtcacgggctatagcccctgtggataggggttggactgctgtgaacatcttcttcatgcagtagctgttgcttgctgggacaatgtcaaaattccataattagacataatttatttcctttaactaaatcatacagttctccccaatggtctgacaatgttagttacatggaaacccttttttgttctgtcaacattatatcagtgtgtgtcatttatggaggaagagatggaaagggagttaggacataaacaaacccttccttccttccacacttaacagcccggttctccaagccagaagggccggaacgcatggtttgagaagagaagttttcccttttatgaatttgtgtgaaaagttgtagagtggcatcagattaaaccacatccacttgttcttttgatgaagcaccttactgaaaagtcaaaaatcacagaaaaatttgtgttgcccaaggacatcaggaaaacatgggtgccatccctggcttctcaccctttgtctgtatttgtttcctttgtctgcctcggtttccagtcttttctcacacccgctgctccccccacctcgtcgttttgcgtccatatttcctgtgttttcaatcataactcttagctttcgcaatttgtcagtctgacatttggaaatacagtttggcgaaagggcccggtttagtcagatgtaacgatcagagcaagggcggcagggtctgtctgccccccagctccagtaccagtcttgccctcagcctgctctgcggaggccgtggttaaaaaagtgtgggaaggagttagatttatttctccatttctaccctgaattagttgcttttcctatttctgtgatcaaacgcctgagaagacacttgggggcggggcttacttcagctcacagtttgaggtacagtctatggaggggacaggaggacagcaggtgacagcagatgggcagacctgtgcagcctgggcttgacacaccttgaccaatcaggaagcagagaaaagacagaaagtgggtggggcttttaacctcagtgcccagatgtcagtgaatgagtcacctgctccaggaagtctctgcttcacagctgcagctgacctgtggctgtgaacacaaaattcataagctttaagtggatagcatggatgtgtagggtaaactttatagatgacggtgtcctggcaacacatggaaatgttgggcatgcctccacgttgttcaaaacagcaccacgtgtttgaacccgtcggcccgtagaggacatcccacatgggaatctcaacgcctcttcacggggcccaggtactacaagggaaaatgtgtgtagacccaggctcaccacgaattcttatcatccattcctttgtactcaggatggctcttaactcttctgcttcctctcagggagtggaaagttttcatcaaaatctagtttgtggaccaagggagaggttggcgtgcaaaaataaagaaaaaagcaagttaacacggcctggaggagtgaaggctgggatgatatcgaggcttggaggggaagctgccacagacagtgggtttggacagaaatccttccatctgaaggagctctgcaagcccagaactctgggaaactcttagaaggttccgctaccaacttataatgcagaggcgtgctttgctttgcttcctctccaggtctgtaataccaccacggacaggaaacacgcagacgtcttcctggagaggtgtgtgacggagtcggtcatgaacatcgtcagcggcttcttcaactcgcccttttcggataacagtgccagcctccaggtagccgcacgcgccgcgccgggaagctgtaacctggctcggatgtcctttctgccactcgggataatcgctgtctcttacatttctccacattgtgcccttctgccctgaccaaactttattttagcggctgttttcacgtgttttatgtgtcttagctttttccattttgcctgttctgagtcactttgaaatttgcgcttgagcaaagaatccagtttacgcatcatttaatcagattgaaagatcacagccccatgtccttccaccgtctctcccactagctgatctcttctccaacattgagagacctcttaaaactaggtcatttcctctttctatacgctacaagatatttcacaactgtatgcagaggccaagtgttgaaataatggctgattgttccgatgggtgggcacccgggccagctgctgcatgttagtaatttatcctaaaggttggcatattatggtttccaagtctttatagatacttaaaagtatttgcacttttatacgttaaatgtccacagataaggagacagccaaacatggtgtatccgtggggtgtcttgttaaaatttgtgtttcaaaaggaaaattaatggctaagaaaagtgattctcagcgtagctcctcagggtcacatgaagcatcatttagttgtgtttgtgtggagaacacaaatgctcagcccggtgtctgtgagttcctacctgcagatcctgccaacccacaatcgacagtatcagaaaatttgtgtggtgaacatgtgcagcttttggtcattagtctctaaataaccttttctttacataacacctacatttcattaagaattgtaagttggcaacacacggttttatttgatgaatttccgaatgtctaaggtttaatgtctcttttggtgtctgttggtgtgagggataacatctggcagacgctgaccttggctttccctccactgaatgtggtagtggacccctgaagggacaggtggacggtagagctcagtggcctgaaggtctagccaaacagggttcaggctcagtgagaaaccctgctcaccaatataaggtggagagtgacagaggaagatagctgaggccagcctctagcctacacacacccacatatacacacatactctctctctctctctctctctctctctctctctctctctctctctctctctctctctctctctcacacacacacacacacacacacacactcacacacaaatatagtgaaaacacaagtgaccaattttctgtagtgcttggcgtgtttcctctcatgctattaacacacaagacagtttgtggagtcaggtgtttatgggtggcattgaagcacacaacactgttggtactttattttttggggtcctgtctgataaggtgtagctctgctccctcctcaggcatggtgtgacttagggatggcggcacagtgacatagggtgaccagtgcccttctgtttcagacacaccagccggtcttcatccagctgctgcagtctgcattcagaatctacaactgtacctggcccagcccagcccagaaggcctcggtggagtcctgcatcagggcgctggctgaagtgggtgagtggggtctgcgctgactcagatacacatttcctggagtaactggggttggggctgagagccgttcaagcagcttcccaatctagacctcacgaagaagtaaagccaggccatttgttgtttgttgtttaagttggaggccgacgttcagcaactggttctcaacatggcagttttgggagaaaagtatattcctgtttccaaatttcaaagtagtgttctacttcaaatatggcttagtaggattttgtaagagtggtttaactggttatcttactttaaattgtggaaccaattaaatttatttaataataaataattaataataaataatatgccaatttattaataagagcctgatgttgttaataactttttgtggcaacaggcgttttagaggttttttttagcattgtaatttgtgtgaaatctgaatcattcaaaggcctgttatacactgaaggcttcgacattatacatgaatggagacaagggatttaaactaaggggaagtgagcctaaaaactctcatagattctccccctgtgcaaagtcatgccttacgtagttttgtattattatataattttgtgcataataggtgtgtgtgtgtgtgtgtgtgtgtgtgtgtgtgtgcgcatgtgcaggcacatgcatgtatggctcacatgttgaggtcagaggtcagcctcaaagctattccttgccttcaacctaacttaggacaaggtttccttgttgctttcccctgcatgctggctcatggattttcctttctctacctcccagtactgctgggatccacctcactgcaggggtgctggcatccacctcactgcaggggtgctggcatccaccccacagcaggggtgcggagttacagatgtgagccactgcacctggctgtatgtggataatggagactcaaattcaggttctcaagcttacaccataagcactgagccatcttcctagccgtgtagattaattatggatgaagtggaggaaagagaagaaatataggcttggatgggtagaaaataatagtgataaaaaggaaactagaaaggcatctggcgattgctggtgatcccatgttttcattgtcatggtcatggtcatggtcttggccactgttaatgtttactgagcatttaccatgaccaaagacaagggcttttacaccttaacctttgataggttctttggttatttatatttcaggattcaggaaacaatgatcttggtcgggagtttagtatatgatttaatagtatgtgctggacagtcaatgattcagctaattatgagcattaaaatatttttagtcttcacctagtctgcaatctggcctaagagattttatagtaacaaaacttaatggtggaaaaaaaaacttaatggtggcagcaattttacagaaatgaaaaatcagatataatctaggagtatcagttggtgactactgcatttaatagtaatgtagtttgcctagggaattgattttaaataagaattctacttataaatacatggaataagtaattataaataaaatctctactgtgctgtttctttggcacacatgccccttgggcctgggcatccctctgaggttctgccttggattgcagagcatcgaagctctcttcctttcctcccttccctcctggtgtcctgagattttcttcctccatttgtgtacaagctccagggtcttttattcctctcctatttcttaagtcaatgctgaagcatttagcgttgttactggtatggcaagtgatgttttctataccgtgtttatggttttgttttgatctgatcctttggctctatcctatgtcactctgttgtgtgaggaccttcacctgtacccctgagcctggctgaacctggcccccatgacctcctcactctcaagctctgattgtcctgtgcatcagccctcctgtccagacttggagctcctttctgggctccggtgctctggatcgtggccactttccatacagtactcactgtgctccccctgaggtcttcagaaccaagagactctgcaagggaaggaacacacagggagggagagactcggcacacaatgtgtaaaagccataatgatactctaatctttattttaaaagatacacatagcactatgttcagaggtatttatgtaaaatacaactccttgtgctagaatgatcagtgagcctttttatttgttcatgctttgacataatttctgaatctttaataatacattgctttccaagttataataaaacagtaaacttttttcccaaattaggaattatatcaattatatcaattatatcaatcagtaaaatgcatcatcagaggaaaagcaaatagagattatatttctatatttctctgccttctctctcttcctctctcttctgtttcctcttttagcattcagcagatgcagtgggagctgataccctaccaagccctcagagggagggagtgctgcacacagcattgagaaactgcagaccaagtcaggcatgggagcagggtactgtaatcctagccccgtgggagggtgatgcagggggatggcaaattcaaggagacagagagagcccctgttgcagacaagccagctaatgaagggtgagtgagtgagagctggagaacttcatgtgtgctcaccacctaaattcaaacctggaggggttcggtttgtagccagatccgttccttcatggaaggatggcagagctcaaatggtcacccaaaccacaccagcctaatgcatatttatttattttttgtttttttgagacagggtttctctgtggctttggagcctatcctggaactcgctcttacagaccaagctggtcttgaactcacagagatccacctgcctctgcctcccgagtgctgggattaaaggcgtgtgccaccaacacccggcttatttttaagatttcattttgcagtagccaaaactgagtggtttttcagaaaaacttggctcctttttgtttttgtgtattcaaagatcacgtgtgctaagaaatcttaaaacaattctatccaaatcgtcagctgaggaagtgatgcagagtcaagctttggcactgcatctgttttatctccacgaggccgaccttcaccttcctcttctgttgacccctctgtcttacgctctacaacccctgtctgtggtaggacatacctgtgatcccattatttgtgagggagacaggaggatcaggagtttaagtcgagcctacactatatattatgggctacacgaaaccctatctcaaataacaaaaaatatttctgttaaaatttcttcacaaaagccatttctttccttcatctccacgatgggctctcctcactgttcatactccccttgtggtctttatttgattgtagcttaggtcaccacacacataaatatggctcaggagttaagagcgtgttttgcagaggacctgggcactgctcccaccacccacatctggtcactttcaacagtttataaccccagcttcaggagatcacatgtcctcttttggcccccatgggcactgcagtaacacgtacaaactcacacacacacacacacacacacacacacacacagttgttaaaaataaaataaatcctaaaaaagacatccataggaagctgatgtcacacacggtcatacaccataccatcttcatattatcacaccatcacaccacatataatgtcatatcatcatatggcatattatagcattatcacatatcatttcatttatagcatcgtgtcatatcaccccatcatattgtagcataccgttcaataatatataatgtcttcatggtttcacatcatgttatattgtatcattatatataattcaattatatctcatgatttcatatattgtactatttcatattgttgtataatatcacattgcattgctatgtgttacatattgtattgccatctcatacatcacctcatcatattgtattatgtataccgtcatgtcatatatcatcatatatcatatataccgtcatgtcatatatcatcatatagcatatataccatcatgtcatatatcatcatatatcatatataccgtcatgtcatatatcatcatatatcatatataccatcatgtcatatatcatcatatatcatatattatgtcatataatttcattttgtatcattgtatcacatcacaccattgcattgtagcatatcagtcaataatatattatcatatcttcgtattgtaccatcatttaatataatgttattatatatgtcatttaattatagattatatcatatcatggcattatacaactataccattccatattgtcatcatatcatgtgatatcacgtatcacataccgtcatatatatcacctcagtatcatacatcaccatatcatattacatcagcatcgtaagtcaaatcttcatgtcctacagcatcatgtcacatcatgttatataccatcgtgtcatagcagcttatcactatgtcataccatcccatcatatcatccagttatgccatgatgtcttcatgccagcatttttcatcgtcttgtcgatcatgtattttcatacacgcgtgtatcatataatttcatgctaccctatcgccctgtacatcacaatcctattaccgtatcacagtgtgcctttcaatcatagcgtatctcagatcgtattacatctccatatatcagatcacttcatattttcatatcgtagctcttcacacatcactgtgtcccatgtcacatcagccatgctatcgtgtcttcagagtttatgttcagtcatatagtacaatcatgtgcacacaccatcttcacctctcacgctttccttcctgcttctcgtcactgtttgaaatctcttctttctcacttttttgctgttttcctcatttggaatggagactctgtaaacagggactttataataatatatataataatttgtcatcggggcctgcaaacctacttctgataagcaggataataaatgtatttgttactttctcatcactgtgatagaatgcttgataagaacaacttcagacagaaacggcacggtgtgtctttgcctggtgttttacgtgtatggtccattgtagtgggaatggcctggtgacaagtgtgtctctagctgtggccgctggtcaccttgcacgcacagccaggaggcagagagagagagagagagagagagagagagagagagagagagagagaggcgaggatgttggtgcccagcccacttcctgtttattcatttggggatcccacttcctgtttattcatttggggatcccagctgacaggctgtgccaccctgtgcagcgtgggtctgttctttcttaaacatctctggaaacacacccaaatgtgtcttctagtgtttctaagtcctgttaacaatgagacgttaaccatcacaataggcatgtgttgacttatgatggtctatggactatggtgacgtcacctaggctcatatcaaaaggcaacatgacaacaagtttgagacaaaggtcaaattaacctgtgtgccattctaggatctggcatctcttcatcaacagaatgactattcctatgactttcgtgaaggttgggactttggagagcaagggtctggggaaggtggaggcagggcacagaatgggccagctgtttctgtacaacgggaaagcggggagggacacccacagtgtgtcacagttccacagtgtgtcacagctggttgctgggagtctctcatctctcttgggaactgacctgttcctgagctcagtgaacacccctctggttaggtcaggtctcctgagacatcaggcagtctacaagagtgacctcccgtgaggttcagcccccgtggtacccatgtgaagctttgctgccacatacacaatcattctatttctgcttcctttcaaaatgcatagcaacactgaaatctggcacaactcaaacatttaagaatgcacaatacttaggagaatagagaataataaatctgtgaaatatgacaagattgggggagatgatatgtgtataaagcatttgggaatcggtaagcccattcctcataaatgcagatatccattatagtttacgtgtgtggagcacctgtttctcaagtgctctctagtgctattagctaaacctatcatcaaaaacacttcatcatcttccagtcctatgcactcagtgtaagagctgcaagaagaaagcaggggcattcattaagtcatcccttccttccctgggagcggtaagcccttgctgaatatgtggaggaatgtcaaggccgagggatctctagatgcacttggttagatgctgttcctcgatttactcactcctgaaaaacacatggcaggaaggcttccagcaaacgcgtctatgaatgacttctgtatcatttcacttgggaaagaattctgcctatgtgtctcataattggcgtgtgacctgcggagattaacattgggtagttggttggccacactattgactttccacatggaaatcgcatgaaatgccttttacaaatggttttgcctagtgaacaaacttcaagccagccatccttaaaaagaaagcaatgtaaaaaccattaaccctttagaaagtccgaattaaataaatgtctattttaatcccctgggggcattgtagtgggagtttaaggagtttgatgttagctcaggggtggagtgcttgcctcctgtgagcaggtttctgtcctgaacaatgcagaagagaggcccaggaaaccaaatgctgaatcaaaacaaaatcacctccgtgaactccactgtgttacgaaacagttaatttgcaataagttataacatagcaactattttataaacatttttcacatattaatgtaactgattgtttaatgattccttgttatctggaaggtattattgtagctgaagtaaatcccctctactgaacacatttcctaggtctgagtttctagggtgttagaggtagacagaccacgtaaagaaagcagaaaaaagtgtaaggctgggggccttatctgttagaaaattctagagcctttcatggcactcagaacacgcaggtggagagtctgtgacatttgcaacattaaagtgcacgacgcagagacatgtccttttgtgtgatgctaacccaacctcatcctatttgcaaacatctgatgtttgcagtcatctccaacatggaggaataaagttaatgccggtgagtggcccttctttgttatgaaaatggctaccctgggggtgtccttaaccagcagcaaagccagagaatgcctttctccttaacatcgtgtttggattttgtcaatcttagtaaaactattgtcagagttttaatgtgtttttctcttctgttcgtggggaagaaaaccattccatacaattgagccattggtatttccttttctgtgaccagttccatcctgtgatttgagtccaaccattacatattaggaaatgagctctttgtttggtaaccagttttctttaattttcattggaattttttttcttctagcatgaggaatttataattcttctggggctttttagttctgtgtgagtgtttgcacatgtgtgagcaggtgtgtggaggtcagagggtaacttgtctttgagagaggttctccaccagtctggaacttgccaagtaggttaggcaggctgaccagtaagcccaggggtcctcctgtctctgtcccccgtggtggggttatgcgtgtacaccaccatacttgacttgttctgggctacagtactcagacattcatgcttgtcacacattatgctttcctggctaagctattgtcccaacccacttcttttgaggtttaatttcattttcagaatagcttctgtcagtctgagttgtgccttaattctcagagaattctcatattctgatcgtctgcaccttttgggcgttactatgaaaagccttgtgctccctggaagtgagcatggtggcccatgctttaacctctgcactcaggagactggggacatcttattgtgagttcctcctgtctcacagagaggaaaatgaaggaagggggggagatggagggagggagggagagagacacgctttgagatacctacaacacacgtacttacagctttcgtggtgtgcactcatctttgtctttccagatgactagccaggcctttcttgagggaacgtaagacgtatagctttgttcaagtcgaggactaatggggcatccgagtagtagagctgagttccacacaggaagcttatgtctatactcaaccttgtccctatttaaaaactccagtggcctggggaaatagctcagtaagtgaaacacatgcaagaggtcctgagttcaacctctaatgtcgtattaaaaaaaaaaagttgacactggcacgtgcctgtaaacctacttcccgggaggcagagatcagtgtgcccctggggcttactggccagccagcctggcctacttgccaaattccaggctagtgagagaccctacatacaaaaatgagctggagtccgaggaaatagaggcaaagttgtcttctggcctctgcatacacgcgtgtacacacacacacacacgcacgcacgcacgcacgcacgcacgcacgcacgcacgcacgcacgcacgcacgcatgcagatttatcagcgggacttgggtttgctgaagagcgatttatcagcgggacttgggtttgctgaagagcaggtgaggcttctgcccacatcgtcatccggcagctccagctgttctggttctgctgggctgacagccagccgaattttcctaattaatgctaactctttctgctcacctctcctcatgcctgtcagtgtgcatatccaagcattttcttccgtggcacctatcatggagttatgtgtgttttcagagggtttggtctggcagacaccatcagttactccagctaattaaaaatattcacacaacacacaatatttaatgaggtataaatagaaatagtttttttattacatcttagagcccctgaaaagacttgccatgtccaggaaagttttaggatttataagtctaattaggaggttagccatgcaataaaaatacctgttagtaaaggtcgctcgggtttttttagaagtcgtttttctccagacagaggtcccccaaagcaaagtgcatgggaagccacctctcctttcccacgcgttccttagttactcgggcccctgtcctctggtgacatgtccttaacaaggcagtagttctaactcagaggcagaggagggacacttgtttgtaagaactttcatgtgaccctgattacacgccgcaggcatgaagagtgtctgggcatagcaggtccactagctgtttgatgctgttaactgtggggatttagcctgctgtgtatacaccacaggtcccagaatgtttctagcttgatggcatttaactcagtttggatcacggttttgacctgaaaatgatgctttcatagttaacactcgtgtaaacaagataaaacaaatgctttccccaagctcatcattcctttcggaccccctacccccacccctggtgccctttaaacaacctatggacatcttaactcagcattgtctgtttgatttcaaattaatacctctatcattttgacagagcagagaacctatttcagaaggccatgtttgtagagtttgtttatttttagtttaatttgttgttgtcatgaggtactgggaagtgaaccaagagcttcgtgcatgctgggcacgtgtcctaccacagagatgtgttcccaacccttacaatgtttgttcattgttgtgtgaacacttaccttattttaactcaaatgcattctgctcagacgcagagttaatcttcttttatggcttcaaagtcatgatgtaaccataggctacagtttacatctcagcctgggaaagttcctattttacctggaattcatactctgcagtgcacgccaagataggacaccaggtcaacaatagttgtatagattggggagcagaaaaacctgacactttaggatggtggagtttgttctgctatctctccgtgtgccaccatagtggaacagcagctcataggtggatcacgggtggacatacattgccgtgtgcaaccactcacacaggagactagggctcatcactgaataaattcccatgctcgtcatcagaaattattcctccagcgtttccctcatgtcacactatttaaaaaccattttattattgttgttttaaatcgtgtgtatctatgtgtgtcttgcgtgtgggtctgtgcacatgtgtgcagaccacagaggccagaagaagacaacacggctctgagaagtgaactcagatcctctggaaatatgtacacgtgaccacccggccacttctccagccctacctgctgtgttctcaaactgtcctttgactgtggctgccacctgaagcatccggctcatgccgggaccataagtgtgtggcttgagcagaggtgacaactgtttgtagtatgttgtgaggacagtgaagagctctaggactggttgggcagtgaccctgaagcagcaccgtcctgtgttcaggacgttcaaagcaaatgctgctcatgtgggagacagccggtaaagaacagaagtctcagtttggccgtggaggaagattaagagtctataaaaccatgcgttgctcagcagtgtggaggctgcctgtccttcagggcgcctcggtgcggcgtgggtgcgtaagggatgtgcacagacactgcttgcttcaaagggaaattggtcaggggcagcaggagtctgttttaggatctgggcagcagggctctaggtcagggggctgttcccagctgcctgcgttctgaagccttcagctgggacttgtatttcagttggttccaggctctgtgttggcagcagaaatcacttgttttaaagaggtgttcagttgtgctttctggtggggaattttcatcagcagaacagtctggtctagtattttcctcactgtgtgcaggaaagtctggttttgtctctctctctcttttccaggctacccttccccatctcttcctcacccctctttcctcactgggtcctctcttctatcccgcccctcctccctctcctctcacttctctccccctcccctttctctgtcttgctccccttctgtctatagcctctgtctccctattctcccctctttccttccccttcccttatctttcttcaccttccatcttcttttcctcctcccctccccctttcctctgtctgtccctccttctctttcacgttctttcttcctatctttagattgagaacacatcttctggtgcctgtcaccaactctgacagggtctgtgggtgtgtgtttcttgactgaacagctccatgacgtcataaggaagccccatcctgcctctacactccttttctccctgcttcttgttggatgtagtactggcttccatgtctgtgatttgtgttccattttggaatataattaattcttctgcattggaccttataaattgtgatgtgtaaatgtgtaactatttgcaacaaaaatgaggtctatgggactaaacttttttcgatggagggggctctaggctgtacacatcatgagaaatcatcttttgtttgttcctagccctgttctcctactcaagctcagactgagttgccatagtttctgctattcatttgacactgtcttggattcttttctctcttttgttttatataatctgtgcacaggagtttcagagaaaagtttctcaggcatctgttctggaatgttcttattgggggatggcatttgagtttcagttaaattttgtacaggttactgctgtcaaaaccttttgtccgtcggcaggcggtccattccattcttccacgggcaggcggtcactccatctttacacgggcaggtggtccactctacccttccagcatccagccctgcagacaggaattcagcttccagcttgatctttgcaggcatctctcttctctcttagcactcttaggctttttgtgctcacctggctttgaattcatttgttccatcacaagttgccattctcagttgctccatagagacatgtgggttacacttctggagggtcatagtctcacagtcaggtgttggtggcaccaagctctctacacagtcaggtgttggtggcagctccaggaactgactggctctgacctttctgttagctatgctatttgctgacagctgttggcaccattggcttgtagctcgtaacctgtctctcttccacctttacatggtgtttctccctctgtgcccccctttattctctgatatggaacagtcaatgtggactagagcagagcctaattcaggatgacctccatcttgatgacacgtgtaaccaaatcaggccacatttccaggtgctgacaactcagacatcaaggtttgctttggaaaatgtagttcagcttgacaacattccacagtttcaccagaatgtaaagctctgtgcttatttaatctcattcacaaccactgtgtcctttattcagagacttgacgccctgctccagacacaagaaatttctctttaaaaatgtttattttgatttgttatgtgtacagatgtgtatctgcttctctgtatgtgcatcccaggcatgcagtgccttgagtggccataagagggcatcagatccacaggaactggagttacaggcagttgtaaactgcaatgtgggtgctgggaaccaaaccccagccagcaagagcagccagggctcttaatcactgagccatccctccagaccctcattattttcttaattttttataaccaatgtgtcatttactgccttttataactttcattcgtcaggtctgtatcttcctgtattggccctccctatttcacaacctctttatttccccatttattcttttatgttttgtgttctaggtgattcattggcttcctttttccagctcaccacttttgttctcatccttttcatttaatctttgaaaggtttatttttagagtcatgatttaatttccaagatcgtttttccctctctttaagcgtttttaggtgtggtgtctactcaaagtttgtatggacaataattagaattaaatattgcttatttgtccgtggaacatttgttttcagttgaggtcattgttcttggtgctaatggttttatttgtcatccctgggtctttgtgtggtcatgggtaatgactgacacagggggctggcagtttggaaggtctattcctggcctgtaagccttgcagaagtaagaaaggttgacctggaattctatgagaagggctgggcagatgacataggaaccttccctttgtgtgcacgcatctgtgtattgtgtgtacatgtacatgtgtgtgcacatgtgtgtgcatttgtgagacagacagggaacagcagtgagtgttagggggattttcttgctggctggaatctccatgcatttcctcctgtgctgggcctacccccatgtgcctctccacgtactcttcatcttatggtctttgcagtcatgtcaagctctgttctgcttctctgcaagtcttcaccattgacactctacagtcagaatccttctctgcaagtcttcaccgttgacactctacagtcagaatccttctctgcaagtcttcactgttgacactctacagtcacagaaccttctttcttgagaggagtttttatgcttctccaactttttcctctgggtgaaaacagctgcatcagacttttgagtttgctagtcagagggaggaggaccttcttctcccatgattcaggttgcttcttgagtagctcagatgataccagtgtagttcccagtgtagccaaggccactgggtagacctgtaccaagtccaatcgttcatgggtcagtttttctccaatggtgtagttactgctttactctggtaggaatgctgcaacacttccattttcctcttgacaaggagcatagtcattgctcaatattatggctacataaatctgttatgatgcatatgtccgtgggtcttaaggaaaaaagacaggctccatgtaccaccttcccaggaaggttttttaaagataccttttaactttttcactatttctgctgtcaggtgtttgatcatatgtagttttgtgggcacacacacatacacatgtaaacatacaggtacaccctttaatgaagttaacagcttggaaggatttggctgtgtgttttctgtctgagtttttattttctttggcatctaggaaggtaaagatctgtgtgcttgttgaggtgcttttttatatcgatgttgaaatgagtccatctcacacattaatcaccaagaaatcaaaagggattttgaaggtgcagtgatcacacattgctaattggcctgaagaactgaaatagcttcagcagcttttaacctgaaagtatgggagacgatggtgtggcaaagtttaaagagttaggcctttcttgcatttgttctttctttcttaaaaaagaaaattttcttccatgtttgttagtgtgtttggctaatgtttaaaagctttaaccaaattgagagggaaattcttcccatatttttttctattcttttcatttcagccaaaaatcgtggtattgcaatcccagtggatttggatggccaggttaacacactcttcatgaagaaccattcaagtacggtgcagagggcggccatgggctggaggctctcagctcgatctggacctcggttcaaggaagctcttggagggccagcatgggattacagaaacattatcgagaagttacaggtacaatgaggacattaagagacattactcttttctagcttctgtatcattgaaatgtgtcatgtgatacaatatggttgaaaatatccagttcttcctggggcaaagctttcttctgtagctctctgccaccacctcctcgttagcagtttatggacagattgtcctgacttacttcttaatgagttatataacaacatgttctggtggtttctgagtgagtagtggccattgatcgcaagacaattataatgtcagtaataaagttagtaaaaataacctactgtaaaagacacatgtgataaattaggttttaatagtgttgacccagtttatcttcaggtgtgttcccttatatcccttgggccaaaatcagcccgtccttctcttcaccaggtccttgtgtggcccttttgcaagtcttcatccgtagtctggcctgtatgtttaggatcagtgagccaatgacatgtggctttcattttctgggacagccacaacaaaacaccataggcaggattcttcaaatggcagaaatgtattctcttatgtctctggaggtgggagtctccgatcttggtatcagtgtggtttggtttcctctgaaactgccattcccgactgtggagggcctgcttctcctgggtctttcctctgtgcagatgtacacctgtgtccccatttctgtcccttgtgtgaccaccaccctggtggctcatgtgaactcattttgccctcatgctatgttagtaggtcttgtctccaggttaagtcacatgtgactgtattctgaggttagatttgggggtaattagttcttacaggtgggccccatgaatgtggttagttcccttatactgtagcctgaaagtggtgtgtttgtcctttctaccacatggggacactgtgacatggaccctgcatgaaccaagaaataggcataaaaactgctaatttcttattcttggattcctaactcccaagttgtgaaaaccaaactgtcatctgtaagccattcagctcatggcatttgttgtacaccctggcatgatatttggaatccattgtaaatgtgataggaatggggattcctgcagagggggactgtgctcctctcctgctgaggaccagagtccgactcagcacttaaccttgggtggctcccaccaattgcaacttcagctccatgggagacagcacctctggcctccatgggcacctgcacacagatgtgcccacatacagagacagacagacagacagacacaattaaaaacaaaatcttaaacaaataaggcagaaactgcgttggagagaagcagatagttttcgggacgtgttttctggtagatgggtgggtgaattgtggggccatggaaagaggggtcaaggatcacccctagttagatgtgagtttatcctgggctaaggcaggagacagtgggagagaggaagcttgtggggacttagaattggaggtctgttgggggattctaagtttgagatgcctctgctgatgccgaagtagggctgccggccagatagctgggtgtgtgagtctggagaggtgtggaaatatcaaccctgggtgttctagcgtgcacaaagagggagagcccacagagctggatgagcagtctcagcaggagacgtagctggagcaggaaaaggaccatgatccaacagggcttagtgaagggtcaggactccagcggaaaattaagtatggtgtcacagaatccaggggaaggtggccatggaaaggtgtgtcccatgtagagcagttagattggggtggaaaagaggccacccatgtaataggaaggtgatattcatgactcatgcatgctctgtaataatggggctgccatctgaaatgaagggggcagtgtgcatcaaggattgtccttagaacttgctttaaatcccgcagcaaacctagatggtactggtgtcatgatgtcatgtggggcaattctgattctcagagggaaggaggacttcacctcaagtcagagtgtcgcttgtccaatggcggaagttaatagataataaatcagactggtttcaccagagcttggccatctctgataagcgtcacccctttgtatgacgaacatgcccctttacagaatctttgtccttttaactgtcatcaggaggatgattggaggcctggaaaacgaagcatgttgggtctcttaggaacctggcatcgtgtctacccattggctagatctctaggcaaggtttgtagagctgaatagatcttggctttctacttaggacttaacatgtctccctggtcagggctgtgcaatgttctcctcagacaaagtagagtgaccctggccattataagccctcagccttgatgctgagtgagggggctcatctccgtgagagtattttcgcctgattcggaaatagcacccagattcctttttagcaaggatgggatgaaaagaaactgttagacatgtggccaatcagacctatcaataaatataatttgaaatagtattgaatgtccttaaaccatgcacagtaagctcatatctttgagtaacatatcagtgagtgtttctactggacaagatgcttagctctgggtgaccagggacacataggaaatgtttagcggttgctcatatgcacccctggtccactccaagttgtctccttacacagtgtgtgaagtggtttcactgtttctccctcttactcatgtactctcagaagcctgactgttacctaccaatccattaccttgtgaattgatttaaaagaatgtgtaaggctggagacagcccaggggttaagagcttacactgctccccagagaatgtgagtttggatcccaggccactcacaactgcccgagaattcagcttcagggcgtctgacaccctcttctgggtacccacactcatgtctatatacccttcccctcgtatgtacatagtttaaaaaatctttaacacacacacatatacatacacagagacagagagacacagacagagagagacacacagagagaatatgaatgaatgaaaccagattgtgttgagtgtaaacagcaaacatttggtgttgtgggaagccagggttcatctggcacagaacggccgcgtctcctttctggttaatgtccttacgcgagccccatcttgagaggcactcatgtgggtcctctgtgccttgtctcaggatgtcgtcgcatccctggagcagcagttcagccccatgatgcaggccgagttctccgtgctagtcgacgtgctctacagtccggagctgctgttcccggaggggagcgatgccaggataagatgtggcgcctttatgtcaaagtaagtggagccagaccagggacctttctggtggaagagagagggctgcagcagtccagaacacccaccttctgatccttgccagaaaactccctggacagatgacccacacaaagtcacattaattaaaatttagatgggttaaaatgagataccaccccaccccctcagttacagctctaacactccatggctctacgtggctaatatctaccagttctacactagagtcctgctggatagcagaggtctagactgtgagggtgacggtgagggtgagggcgggaactgactaaagaagctgcagtgtatcagttctggttccctctgaaccaggcagagtgcatggccagagtcttagcttgactattgtccctgctaaccccaccctgcccatctctctgaagagccaagagtgtcatttgcaagcatagctagaaacctagaactcagttctgttactagccacgccacaccctggcactgctgtgcccggcacgccaatgaagccacagcaaagtggaatcagtttccctccttcctccagagaccggatgggctcacaggagtgggtggggacagcctcagggaaggacttggactctgctgagtcacatgctgtgggatgagagaatcggtccagtcacctgccaggcagctggtttaggtccacttaaatcctcatctgctcttgtgaaagagaatctgtgttttttagacgttggaatggagacccacggatggaaatcaagtctgtgtcggcagaggctaatataaagacacggcttaggaaaaaataaaaaaaaaaaaaaaacaaagtacctctcgcacagtgaggacaatttctgggacagtgtgcacacactctggtatcccccatgtcagacccacactcaaggctctttagtccaagctccaccccttctttatttatttaccatttttttgacatggcttccagcctcccacctgcgtggtttgtctacattgcctcctggtcagagttgatttcttgcccttcccccgtccaacatcttctaactcaagtgttacaagagatttttgtccggccttctcccacaactgctttagctcccaaataacacacagatgctatattaattataaaattttggccagtgactagagattcttattggctagctctgcctcaattattaacccatttctattcatccgtgtatttccccatggtcttggcttacccgagaaagcctggtacatcctctcttccagggctcacatggcgactccatctgcctacgtttcccagaattctcttcatctcctagtcccccctatacttcctgcctggccaatcagccaatcagtgttttattcatcaaccaataagagaaacatatatacagaagacatccccatcactcaagtgctgtgtctttgttgatgccttctctttcttaccagcatcaggaaattaccacaacagaataaagctttttttttttttttttttttttttttttttttttttttttgccagtacctctgtttacattttagtagctctcgtcatgtcagatggctatgttcagcctgttgtgtgcaggactgtgtcctgaagccccagagattgtttggtgaatggcagcacttacaggggattgggctaggaaatctatttcctgctttcctcattaggactgtgtaactggaagcaaattgtgttatctgtgagaggctcctttctcctcagcaaacagttatgtagcccgattgtggcttgtggagaggatgagcagtgaggaggtcctccaccctgatggctgaggacattagctggtcatcagccagaggaaatggcttctcagtgacatcccgtggcactcactctaaatggagacttataaacccatgctgctcttgccgtgtcacgggaaaccataattccctttggtctgcatcacgctgttcctctaggaagacgtgtctcacagggtcaggggagggtcagtttcttaacaacccagtctatgggaactgagttacatatcctaatcataaacgttccacttgatactgactctcaggatggctccacccacggtactgaaagtcttcgagagccacactgcgtgcttcaacacagtcggggaaggagccgttcctgtgtctgagttacagcaatggtcaagctgtcttgatgctacacttgtcccttctaatcgcagcagccgctcacatctaccaagcaataccgtatcatacatggcgttaccgagagaatgggggaaagcccactaaactgtggtatcacctacatccatgatattccaattaatgtgatacaatgaatagaaaataataaatgacatgatgacgtaaagtatgctttaaatctttttaaactagcaaaggggaacattggtgtttccctgtttcccagagtgtcatagccccccaaagagctcgctgaggccgggcagcactgagatacataaacaccgcagcgaggtctacaagctttagagacctttggcattacgtgtctgatttaccttgtgccttcagcactgtcccccactcccacgcagcataccgtgtacgtttggatgagaaattggtgtcccttttaaggtttcatgttttgctttcaggctgattaatcacacaaagaaactaatggagaaagaagaaaaactgtgcattaaaatcctccagaccttacgggagatgctggagaagaaagacagcttcgtggaagaggtatcccttaactttcagtactcggaagtagacttgtttcctttcttctccattttgcatttgaaataccgtgaaaggattaagtctggatttcaataggccgttgtacaagtgcttcttactggctgtatgataagtgggtgttattcatgttagccacgttattcatgtcctgtgttgaactgagggacacttagatcacagtggatcaaatgtgcgtcttagccagtgctctgcagtctgtcttggatgttcgtgtcatagtctttgggttctggcagactgtttggcttaaagactttctttgtggtcctgggaattaaacccaggtcctctgcgtgtggtgctcgggtgctcagctgaccaccaagctccacacccagatctccaaatgaccttgtgagatgatgagtgattggaatgcagtgtttagattttgcttaaggtgcaacagctggtggagagtgtctgtgcacgttggctcgtgtttttaagtcagaattatgcttatgtcatttttgatagtattgtgtcaagtattgtaagataacactattgctctaaatacggggaatagctggtctctatttttagctgtattaacaggtgcatagttgatattcagagacataccaacttacagattgtcatgcagttattaaaattgacagttctggtgctcattaaatggtagccagccgtgttctaatacccacagtgataggcttaaatataaaatagaaatcttgaaaagtttttctcttctttttgaagggtagctacctacttttatgttaagcaccaaaccaattttctataaaagtaccttgttgtatttgtggagtatttccaaaaaaattgctaatcctctggtattttaaaactgtaaaggtttggtttttgttagtagagacacgtgctttctaatccctgaaagtctagggtgattggatcttgttttcttagcatgtcttttaaaaatgaaatggagtgcaacattggttgtcagcagggagggctttgcttccaaaccctgcatcaacctggtagcatggctctgttgctatagttcttgccacccaagtattggcacctgagttcagctcccagaaccaatgtgaaaagctgggcatggtggcaaacatttgtaattccagagctggggaagcatagggatccctggccagacaacctggcctcctgggttagttctagacaggtgagagaccctgctcaaaacacatggctggaactggtggtgcaacacctacagttgcacgcacacgcacacgcgcgcgcgcacaccccccccacatcctgatagaattgagtatttactaatcaaaatgctttctgctttagtcgcactatttaaaactatatttggacaacaaataattaagataaatgtgaccagtgtaattttagcaatttttttttcacgtaagattgaaggagaccttacacatttgagtataagttatgggcgttttcaggatctgcagtcgttctcctgtggccctcagtgcagtgctgacacttagccgacttcacggatgaactaggtcaccaagcagaacaattaggtcaacatagttttctcgacaagccttccagtttgacagagcagatcaataccgaatgttctaaaagaaggaaggagaaacatggggaccctggtctcagcaggtgagagtgttttagtgtcttccaagctgctggctctgaaattaatcgcctgttctccctaccccatcctcctcacgctactacgtcagcctccctactccctccttccttttcttttgtctagaaaaccccagtagttcacacgcgggcaaacatgcatggactcttttaagccccgccttcgacaccacacatgcatgcacatacttatgtctatagcacacattagaaaaataaagcaatgtagtggctggagagatgctctgtggttaagagccctgactgctctcccagcacacacatgactgctcatgactatctgtaactccaggagatccaatgctcttttctggcctctgagggcaccaggcacacacatggtcacagagacacatatagacaaaacaaccatgcaaacattacagggagggagagagggagagagagagagagagagagagagagagagagatccaccttccttatttggcgctgtgatgaagcactgaccgaaaaacaacctgagtgaagaaagggtttacagcccgtcatggaggagcaccaaggcagaagccagaaactgatgtagagaccatggaggaagtctgcttactgccttgctctctccggcttgcacagctagctacctctcttatatatcctggtctgctgcctttcgatggtgtcagctacagtgggcggggcccttccacatcaattagcaatcaagaaaacgccccacccacaagagcccatgggccaatctggtggagggaattcttcaacttagggttcttccctggtgtgtcaagttgacagcctgggttagccaacacagcaccccagacaagtagagtcagataaacctctaagaaaatattagaggggtgtgtgtgtgtgtgtgtgtgtgtgtgtgtgtgtgtgtgtgtgtgtgtgcgtgtgcgtgcgcaagtatacaaggaaacattgtcagaaggattattgagcagccgagctcttacttatcctgctgattcccacatctcccaagaacaaagtaagacagaaatatgagtgtaagactctttgctttaagccaacttcttctgtgtttgaagttgctgacacattgccccagggagttgtaggggacagtgtgggagattcaagcgtctccagacagcacaggttgccccggagtccactggcttcttaaatacctgatgcttagtgatctttgctggtggatgggagcagagcgactaagcctgtgtgaggtagtgctggggaacatgctgaccagagagactcctccaccactcaggaggggttgcaggggaaaactggttcagtggttgggcaacaggcaggtccttcataattgtcttacttcccggttcactgacaccgcagtgtctaaaaatgtccaaattcaccatcacacacatgtggggtgaaaggttaacatcaggacaaggcaggggtacatgccctctggaggctgttggctgtattcatttcctagtcctgtgtgtcttctagaggcctttgcatgccttgtctcatgggccccatcttagttagggtttcttttgctgtgaagagacaccatgaccacagcaactcttacaaagggaagcatttaactggggctgactgtaattacagtccggggattcagcccattttcaccacagagggtagcatggcagcgtgcagacagacatggtgctggagaaggagcagagttctacatctggatcctcatgaagcaggaagagagagagacactgggccttgcttgctcattttaaactccaaagcccaccctcctgtgacacacctgctccaacaaggccacacctcctaatggcactacctcagctttcagatagtagctcatagagacctttgtcatccaaaccaccacatgcccttcttgtgtcttcaaagccagccactctcccttcttgttctctcccctctctcaagtgccactccttccacacaagactcccgtgttcttggaagacctgtgattacattggaaccacttgaaaaatctgctatgatccctgccccatgctaagatttttaacttaattttatatgtaaagtgccctgcttccaggttctttaactagagagatcacaagccataggcatgtttgggggaagcatttaactggggctgactgtaattacagtccggggattcagcccattttcaccacagagggtagcatggcagcgtgcagacagacatggtgctggagaaggagcagagttctacatctggatcctcatgaagcaggaagagagagagacactgggccttgcttgagcatttgaaactccaaagcccaccctcctgtgacacacctgctccaacaaggccacacctcctaatggcactacctcagctttcagatagtagctcatagagacctttgtcatccaaaccaccacatgcccttcttgtgtcttcaaagccagccactctcccttcttgttctctcccctctctcaagtgccactccttccacacaagactcccgtgttcttggaagacctgtgattacattggaaccacttgaaaaatctgctatgatccctgccccatgctaagatttttaacttaattttatatgtaaagtgccctgcttccaggttctttaactagagagatcacaagccataggcatgtttgggcttggcagttatgtagcccacctcaaatgtgcgtgtgcacacacacacatgtgtagctgggggcgtgcacacctttattttgtgtgttgaagggtttgtaggttcaaatctgaatggagacttccttgagacagtgaagagcaaagacagtccagtagggtgggagggtggggtggagccgaggtagctgtccgcagtgtccagtcaggagatgagatgcccagttcatggagatggtaatgctacctgtgaacccaggtggagtattaaataaaatagcacacacaaagcattaagagaagggctgatagacggtaagcttttcataagagttagttaccattgccttttaaaaaccaacaccgagaaggacgctatggctagcatgccactttggaatgtgctgtagtctgcagtctcatggtttgatttctcagatatgcagagaaatgagacaagaggttctttaatcttgataagaactcacccaagtgtgggagtgtcatgcatttcttcagcagcttgctgaagaaatccttgacgatttcagcccaagttgaatggaggcaagatgaagacagagctgaggggttttgaagattgaatttttacaaacattcaattatgctcagacttccctcgactcctcatgtcgtgggctgagttgttttcagccagagcattagacagatgtaaacagtgtgctgtgtgaggccattgtccacagcctctcgtggcagcatggcattggacaaacagcctaacaactagcagatagctgtgatctttacagaggcccagctggggcagacagcatttacacattggactgggatagcaggcagaagtttctggatttgacagctttttatctcagagtgatttaggagaaaattctgtcagaatttattttctgtaagaaaattctgtaagaaattatattaaagatgcccctccccctctaaaatttgctgtcacttgaggtaataataattgattcttttcttcatcaggaaaaaatcataactaatcttccatttttgattgtgagaagcaccaaaaagatgtcagaataatactaagcaccttagttcctaccccagacgccgagcctggcagtcgtcaccataatcctccatgcaaatgaatttacaacaaactctgctcctaagaatgtgtttgccaggtggtggtggcggcgcacgccttcgatcccagcactcaggaggcagaggcagaggcaggtggatctctgagtttgaggccagcctggtctacagagtgagttccaggacagccagggctacacaaggataccctgtctcaaaacaaacaaacaaacaaacaaacaaacaaacaaaaaaaccaaaaaccaaaaacaggatgcacttgcactcagccacttctgtgcatgtccttggcctgctttgtagcagcaggcagataaaatacattttggcaggaatgcaatggaatgagcccatgacttaaaaacgtcatccctattttgcaaaggtgaataaacacggctgtagtacagctgctcttcagtgcacttctgttcttagtaagtgtctttcagagatgaatagaaagttgttttgcaaggattctagtattttaaactagagcagcagtaactcggcaaacctgaagacctaccattcataaacgtgtgtgtgtgtgtgtgtgtgtgtgtgtgtgtgtgtgtgtgtgtgtgtgtgtagatacacacgtgtgcactgtctgtgtgctattgtttaacttggtgtcagatgtctacaagtatgaaagcgcgaagccgtctttggagattgactttagaaacagaatgggcacagtactccacctcaggagtttgcattttgttttctcatctgggcaaaacgattgttgaatgggctaaaaacactggtagcttttataaatgttttcttttctgtcgctggtctcgccgagtttggccgaattgctgtgctctatacggaaaagactccatgctcttcacaccttggtgttgcttgcttcaaaatccgagatagctgcatccttcctggtcttgagtcttttcatacaactgagtcattagagattacagctggctggagagctggctcagtggttaagagcaccagctgttcttccagaggtcctgagttcaattcccagcaatcccatgtgggtcacaaccatctataatgggatctgatgccctcttctggcctgtaggcatatgtgcagacaaaactcgtaaaaataataaataaaatacacagagattacaggtggaaggtcacaatgggcatcttctctgggctcagaccgaccactgtccattgtctctgtgaggctgctgagatggggctctcattaacaagctaaactgggtaacttcagaaggcaaaggcaaagccaaaactgcgaaaaagttaactgaagaaaaaggacaagataataaaattaaggtattgttgaattatcacagtagtcatttccacctaagtctgacataaactcttctccagaacatgccccatgacgactttagcttcagtttgttctttttgaaaagaaggaggaggaggaggaggaggaggaggaggaggaggaggaagaaaaagaagaagaagaagaaaaattagttgatttgattcaggggctcactatgtagccctggctgtgctggaactccatatgtagactaggctggccttgaattcacagggatatatatgcctgcttctgcctctgccttccaagtgctggcattaaagtgctgccaccacacacagctttgctttataaccactgtggcatttatggtgtcattatttgcccgattttgaaccttgctctaagattccttgagggtgttccctttagcgtgtgtgctgccattttaaagaaactagggacctgttgagagtgggccagacttgacatatgagctgaagcccccacatcacccctgcagagctgagatccacaaagttctgcacccccacccccaccaccccgctcatctccacccagattcacaccctgtttgagagcaggctactgatcttcactgctaagcttccggtgtttagcacttggccatgcacacagccattgctcagcaagggccttgccatcaatagctgtcagccagcaccagccctagctgagaagcgaatgctcgaaacatcacttgaaatcctgctttgcttatctttgtgttcctggaaggggcaggttttgtgggcttcacacacccgcagagtcagaccagctgcccaggcttcagcacagaaggccaggggtgcaagcggggtcacccacagcagtgtgctgttgtagtgtgcacctactgtgtggcctgtgaagcaagaaaagacggagggtgtcagacggatggacgctgtgcccaggagcagtgggagggactggaacaaaggcaggaaggatgtgatgagcagcggtgaggaggaggaggtgcttccattccagcacctgctcccagccttgaggagaggcctggagagaatgtgctagagactcagttcgtgaacagagaagactcagcctggaggctttgagcccagagaaagccccctaccaaaatcagagggcttgaggctgtagaacaaagacactgagtgagatcagctactgtagcagcctgactgctgaccccagacagtgttggaaccctaacagcaggacgtgaggcagtaggtctggtgttgctgtctttcggagaaggaacagagtatctgcagagtgcaccaggcatcccatgttttccatcagatttacccgttgcaggtgccaagtggatggcaacaaaacctggctgtcaccttgttctccagccgttaccaatgtcatatctagaggagctgtgggctaggtaacaggctgtctgaagtcactcagcactctgcaatagctcccagaggccacggagtcctgaactttgttttatgactaagacaagaggtgggaggggaagtgtgaatgcaaatcccagtatctcttgcccctgtctaacatgttacataatggagccaaggattaaatgatgtcagtgaaacaaacagtgctttacatttgattgaatcttttcaagctggagccgcagactcatttttctgcccgtgtttttattgattatcataaggtgttagttcaaatcaagagtggcataaggaatggctgttatggaaggctaaaactggccctagataaagtgattagcctccaaacccacaaaacaccagtctctccacaatacatcttagttaactgatttgaagctgccctgagcagtttatagtacaaagctaatctttgtgtggtgtttttcagcttagtggtattaccacagtccaggtggactcagcattgtggagacccaacatccttttagagacttcagagttcactagctcaagcctgaaatcctatacaggaagctagatgaagcctatttctagaactagttagtattctatatgatcaataatatcacaaaagaaagtttaaatatgtatatatatattaaatatatattaatcttataaattttgagataatatttataccttaagaaaagttttaaaaagtcaaaacaaaactaaagaattatgagattagtggcaatagaatattccctaatttgggtttttctcctgtcccatatcaggtgactcttctgacatgagacagattttggattttactttaacaagcatgcttgggtttagagaaggagagagccatgctccaactccaaagccagctttcatttttaattggcttgggactaggaagagaccatttgcatatatgtcagtagagagcagtagagacaaacctttgggaaggtttatatgagattttatcctattgtaattgtgctatctcattaggccaatttactctttttcttggggaattttttttttctgcatgattgattcatccttcatcttcagatgtcttatctgtcctgtggtctctagattccttagttggatacctttattctcctgcaaagacaaaaacaaaaccctaccacaactttaactttagagtttccccttttgacaggtttaatggccatgatgtttgatgaactgttacctctcataatcaagagggctctcctgtttgcatctagtctttatcagttttgatggtatctacagctcttcctctcctatggaaacaaagccaaaacctgttccccaacgtaacacatatcctggttttgattctgaggtcaatacatctttcaagtatacaggctgatttagttcagtagttttcttctatccagtgtctctctgcaactattgttcctttcttttaccctaaaaaaatttaaagttcacagagtattgtgcaatctaactctgggagtctttattacccctttctgtttcttaagcttgtcttttaaagtgtggtatacctgtaatatgttttatgttgtaatatgcagaaaattatttcattttactagagacatatgctggaacattgtcagtcttaatttatacaggtattcccataatggccataacttctaacaaatgtgtgattatcaaatcagcctctacagaactcaaagcagttgcccactgaaaatactgtgtatgtatctatggtgtgatgcacatactttaactttctaaactctgcaaaatgaaatacatctgtctgtcaaatttaatttctttgaataccctttgtgtttcttcctgcaagtagtgggatttggttgtataaagaacaagtaggacatttccttggcttgttgccaagtgaaagaaaattctttcttcaaactcttactattgacatggtgtttgtcatgaaattctgaggcttctagcacacttcctaccagtagctgataattttcatcattacctcatgcaagagggcctggtagacccatatggtatctgatatgtattatatacaagggataatttatatttttgattatttattgcaattgaataaataggaaagtttattctgaattatatggaataatttcagtggcttcaatatgtaaaacaactctttatgcaaattgagagtcagcaactacattaagaggttctggaaaaactaataataccacaacaatagcatgtaattctgatttatgaactaaatcataagggccttgaggcactttacttagatttcatgacttataacctgcctttccagaaattggtgttccttgcacaatgtgaggaagaatccaattaattcttttattttggggatatttgttactaatctctcccaagaaattactgcaggctctttgccagtgttcattttccatccataatgaggaaatgtcagcattaggaaaaagcactacaatttcttttgtgtcagtttctgttaatttatgacatacatctcaattttcctttcagaatcagtgcagaaaccctttccacatagatctttatttatttatttatttatttatttatttatttactctgtttgtgtggtaaaatacccattctaaaatattatcttcctgtaggaaaatgtgtggaaggatacagtcaaactggattcaagcaaaccacatgtgcatcccatagtttcttttctgccacagccaattctttctaagccttaccttgtaattttcttgaactattgaagtctctatcatcttgtaaagattcaaataaattacttgggttttgagttgttaatccaattgtgggctgtagctagttaatatttcccagcaatttttgtaaatcattaagaatgtgtaattgatgatttgtactttctggggttgaattttttgtaaacctatccaacatcctaattaagtaatagaaactctgtattttttctggagcaatttgtaacctccatcaaggcagaattttccttgcttcttcaaacattttcctcctaaggtatccgtgtctgaatcaactaggtagatatcatccacatgatggtaaattatagattgaggaaacagtttacaaattatttccagtgactgttgtacaaaatatggacacaaggtggtgctgtttaacatcctttgtggaagaactttccactgataccttttaacaggctggggattactgtaagtaggcactgtgaagacaaatttttctctagcctgttcttgtaaaggtatggtaaggaaaaagtcaatcacaaaagtagaccatcctttaggtaatagagaaggtaaaggaatcctgggctgtaaaaagcccattggctaaatcaccttatttatggcttttcctttcttccttccttccttccttccttccttccttccttccttccttccttcctttctttctttctttctttctttctttctttctttctatttctttccttccttctttctttctttccttctttcctcctcctcctcctcctcctcctcctcctcctcctcctcctcctcctcctcctcctcctcctcctcctcctcctcctcctcctcctcctcctcctcctcctcctcctcctcctttttggtttttcgagacagggtttctctgtggctttggaggctgtcctggaactagctcttgtagtccagactggtctcaaactcacatagattcgcctgcctctgcctcccaaatgctgggattaaaggtgtgtgccaccactacctggccttatttatggctcttaaatctgttaacattccccattctccaaatttctctgtaatgacaaatataggagagttcccaggactggtcagttcttcaatatgttgagcatttaactgattctataccagctgttctaatctctgtaattttatgatgtcaaacctgactgttccacccagacagatttgtcaggtaaccattttaaagatagggctgttggtacctttgaaagatcaccatctgttctgccctgctcatgtacaacctcaacagtctctgaccacccttaatacattttaatatttctctcagaagcagtctttattttgtggtttgtttctgagatggggggagtgttaatctgtgttttccattgccgcaacaaatcacagccccataaattcattgctatgttggccatatatggtttggattttcctgtctgtcctggccctatgcattcaatgtatctagcacttttttttttttttttttttttttttacctgagatacgcagcagtccaggaagcccagctcccagggctgcctgcgaggtagcaataggaatgccttcaaggaagtaaggatttggggggaatttcctatctatctatcagggctggaactgaaaagcatcccaagcctaaagatacatgttctcttcctgcatatagtcccgaagcacaaggagggaagcttgtaaatttttaatcaaggctgtgggaccagaccgtcttctgcagccctggctatctgtgaaacttttccccatgtaaagttgttcccctctggacttgattaattggttgttatttttgtcctccatacaaatcttaggactgtaaagcatgaacagttagttagctgagcctaaaattttgtatcacaaactaaggttagaagtttgtgcagaaagctgggtgttggtggtgcacgcctttaatcccagcactcgggaggcagaggcaggtgagtttgaggccagcctggtctacagagtgagtgccaggataggctccaaagctacacagagaaaccctgtctcaaacccctccccccaaaaaaaagaaaaaaaaaagaagtttgtgcagagtgttaattgctatggaacttagtagggaggggcttctggtctctgttatcagccaggcaggatggaaactggaaagtgatccaggtctctctgtgtctcaaagaccttgatttaacaaagcagacatttgcatccctgatccctgagcattatctgtgaaaagtctaactcataatctgtacacagagactctcaatctggctaatctccctatctgcctagctaattgcccagaacaggtttctatgtttctcactgttttgtgggacaaaggcttgttttaattaccagaattacacagtgtggggagaagtcatccttctgtcagtgcagagaaataatggtgccccaaaagtgaggaacatacttccaaggttgtgggacaaatcccatggctattttaggggggatcagggtagtacccaagagaatttcaggcagaatcaatcctgttattcatagacaatggatccataaaccttgtttatgagtttatcctccaccagataaattgtttttctcggcgatcgaccttatgaatatcagctgtcatctactgtgtatctttctggacaccaacagagatacagttccaattctagaggttgaacatgtacctcctgaaaaggccaatctgaatgctgaaagacccccaggcccctaaggggcacagggtcccgaggagcccccgagactcagaaaccagaccaagagctgcaaaagcaagagggtttattgaacgaatgtgcattcaggtgtcagcaatatcgggaaagctgcacaccccagcatggggtgcaagctccttatataggaaagcaccgcagatcagcatacaggcaaggggcacaaagtgattgattacaaagtatgatctcgtgttagagaggtcacccaggtgtgacctgcttttctacaaaggaaaaaccacagaatgtaccctgaaaagtccctgattgtctgttggccagccaggtgtgacccaaagagggttgtcttggcgattgccctcgtctaaaccataggatgtgcccggggttggggccaacttccttgtcctgggccaaggcctgtgggaacctttttctctctgtgaactaaaatctttcaaaacttttctctcagcaaactaaaatctttcaatgccaaggttttgtgaaatcattgttacatcttcacctgtgtctacaaaacccccaatttcgatgtcctttacatgtatttttagctttggtttctgatcatttatagcagtttgccaaaatacttgtttctggtctctcctgaatgttttgttgtatctgtggaggttcttttgtctttggacatatccagggcagtgtttttttttttttaagatttttttatttgaattagaaacaagattattttacctgccaatcccagttcccttcttcctcccgttggcagtgtggttttaaataacaggatctgactcttttaattgctctgcaaatgagtttctccaatggtgacagggaatgattgaaccctatctgatatgttgcctgcgggaggccactcagggcattttctgatggagaattgatgcatttcctgtcccatgttgatcggcatccattagtccagtgctgctctttacctaccttctgcatattgcacaaggctgggcctggtgtctggattatctcttaaaaaaaaaaaacacattgtttctaggagcatcttcctataattccttttcaaattaccttgtctatcataattaaaatgtctgatattttgattttccttaaaatttgtagaaatcccttctcctattaaaacagcatcatagcttatgatgccacatcagctgtctttggatccattcatctctgtgtgctgatcttacctttagaggctggatcaccataatcttgcattctgaattagcattctcaaaagccaaagattcagttagtgtttgcctaacttctggatctgatatcattccatttacagctgaggtcaatctttgtaaaacaaaacaaaaacaaacaaacaaaaacccagtggtggtttcttttaggccttgtgtaattttagtaaatgactcagtcccctttcctgatccttcaaccctgtcccaagcattcaaagctgctgtgtgacacaacaccaaagtgtcatcatcaaatctagactgttttctccctcaacgagaagctgctcttgggaaattgcaaaccctctagctgtattcccctgttctgtggccctagcttcctttctctgccatgtttcccattgtaactgaggaccagcttccaatattgctgtagctaaatgtctccagtcttgtggaatgatactgttcctagtggcccatgaatttaacatctgctttgcaaagggtgaatgcataccatgaatcttaatgcattccttaaatctcttcattccttaaatataacatttctccaggatcccaggtaacttctgcatggccttgatggcagctaccatctggtggtcattctcctatgctaactggataaattaaggttgattttctgataaccttgggccattcctcttcagtttcataatgtaatggtgtggtaggttctgctctaaattcctctgtgtctgagtatttttcttcttttcattagtaagtctgagacatgtcttatcagtaataagtctttctaaagcttgattcttatcaatgaatagtaagtcaaattgtcatatttgcacagtcttcaaaccactttttgaggacaaaatatgaattaccaaactgacaataactatgaatgacattatgtcaatcccacctaagttgttttcccctcatttaatttttcatttgccagccatccatagtagccctaaatagggtcctaactccctgcattgtgacgtttcagattcttcacatggggaagattccatcttgtctctttttaaaaacccaatcccccatttaaaaattcccaagtgtcttatcagctctgacgatgctgacatcataggtggggatgtatggggataattaactgcagtgaccatgctcgactgtgtctgaaggagggcaggtgcactggggaccactgtggctgcttagtgttgtgtggggagtggggtgagctgtctgaggagctcaagcaaggaaataggaaatcagtaggagaaatctgcacagcggggatacagcatgggataggactgcccagcttgctgctacagagaaaaggcaagatgcaaggtgggagaaaaccaagctgcctgctgggagtgtcgggtagggtggctgaccagcagtatactcagctggctgttgctgtgctgggctgaagacacctgcttgtgcaaatgtggggctgagggtgtagacaacagctagctgtggtagaggtcactggcagtgacctcagccgggttcctcagctgcatgtggccatggcagcagcagtaaaagcccaagccctgagtgggtctccaggcagccaaactggcctgggttgatggcccagggaggggattgggggagaaccacatggtgggaagtgaaggcatggggcggtggtgggaggctcatttaggtggtgttttggggcctggtgtggacagcagctgacaactgatgtagaaagactgcaatgcaaaaatcccccagatgggagaaaaaggtgcagagggattgtggggagggaactaagcaggctgctatggtggtggtggtggcaacatggtgggctcaccgccttggcatggcttaataatgccaggtgttggatgccaggcataatgaatatataaattgttccagtctaataaaaacccaggagtcacaaattgagataaagacctggtaaatttgacctctctccatggttttcccaaaccatcagccccagaaattccccctggaaaatccctcttctctcttcctgtcctctctagcagacctcctcattcatctaagaactctatggctaatccctgtcagccaatcgctgactctgtcctgtgatttaaggtggctttgttgtcacagaagaatggctttatgaacaattctgcaacattagagtccatgtcccaatgtgggtacctctcattttgttgagatgtcaggccacagagctgtgggatgctgcatgtggctacagagcaagagtgatttaacagtgtagaacacagaccacatttcatttgtgtctaatggtttttgaacatctgccatgtactgtttccttcagcatccgaattggtattggcatcagtttgtctcctgcttgttccacctggtgcctgagactcttaagcctttctggatacttcttccttcaagcaaaaggcaccaagagtttgaacgtttgcagatttctcagtggagttgtgaggctcatcttttcacagtcattcttaggttttgtttgtgttgttaactacacttcaaactacagactctactgcttacacaacatagcctggggaagacaaaagaagtgtgataggaacacaacacggtggcttggtatgaggagcccagaacatgacgtatctaatgaggaccaggggataatttggattggagagggcactggggctgagggtatcaacacagaggtgtttttctttagtgatctctatccaaagttccgagtctacttcctgtcctcttgccgtgcaagggtgtatgtagtcttcgggatctgttagtcccatagaaagcagtaacctcctactttgccactgtgggattgcttttaacaattcaccatcaggatcacgccatctattaccagcgtgcatatagccattgatgccggagaaacaggctgtgacctgtggagagttggttgtcttgtgggcagatccagactcttaggctcattgtcctgttttttgaatgacagttctgacagtggttccatggtgcttttccctgtcagtgaacagagcaacccccaagacccctgggcagccatatttccccagttctctgcacccctctcccaagttcctcttctctccctctgcaacctgtgcccgttccctgagaggtgcctttccaaggccagcccttttattgaatgggaattttctcccccatcctccacctggaggaaacctgcatgtgtgcaggtttccactgctgccccagggctgattcctctcccatttttgaaattcttaacaacttgatttttgagtgaagaccttggactaaatcatcttgacacctgtcacatccctccattcatcccagacggtcctcatgcatatctagttcaacaggaagttcccacagctaatactctggcctctcagctcctgacctcggcatcatcagggacctttcttctccatcacctacctgtcatttctcgcacctacaggagctattgcatttgtgcagccactcatccaggagtcccagcacccaggtctctgctgtgcctatgctggccatcctcagacctaatcaggacctcagatcccgctaacttctcacctcctcagctcactcatcctggtgtatgtcagccttagagttaatagcacaagccccactgcccagcatctgaggcaggagactccccatcatcattccgaaggaaatcagggggaagggtgaaggtggggagtcataatgagttcaccagaccccagataaatgataaataggtcttttattggggatgaacagtaactgtcgcggctttcctgctcgaaggatgcataccctgtctctcctatgctctccaagacccaaaaggggcttccatccccagctcctctatcttaaatgggtcacatccacacctgaaaccacacccaaagggtgtggccactgttacaggttctcaggcaagatgctaccacagaagggaggcaactcctaaggagttggagagttgttgacaaaacacaagggaagagatgtgagatgggctccaagaacaaaagaacacccgcttcctcccgagagcgacttgagcagatggtatctccagactaagttagctggctgggttttctgctccctccccacacagcccctcataccacctctctctctgaataaacagactttccaaagttctctttcaagatagcgtctgcctctttgcacacgtgggcaccgtgtgatcttgggagtgaagtggctgagggatcctaaggctgagaacatatgggcagcagtattgcttcttctcagagtctgtgcctcctaacaagacatctgctgggcactctcgtcttggatcataagctgttgtttgccaattgttttcataaatattaatctccgagatctcgactgacatacgagttgttctttcggattcttttcttattttcatgtgccatctttacacaattgtgccaaattacagtgaaaagggattttttaaaataaaaaattcctatttctaaaatgggggttacgaaatgtctaaagaaaaaaaatgtgactttttcctttacattgagattttccttctttttaaccaaatgcgttggctatagaataatgctttcgtgtttgtttgtggaagtgggtaattagcttcagtctttgcaaagcaccccagaaaggcattgtgtacttgatggaggtaattgttctgtcttcctctaaaaggaaaagcgaatccatcttagtctggaactgtgaattgtaaagttggatcatggttttggactttgagtagttctgatgttctaatgtgttgtgatttgacaatggaccttccccacaagactgtgtgtttgagagcagtgttctccagcagggggcgccgatgagcaaggtggtggaagcttgaggtggtgcctcagtgacggaagtagctcagtgcagaggggccttgagattttatagtctggccccgcctcttgtctgtggctgcagacaccacgtgaccgatcctgccaccatgccatcgggtcccttttccctcaggttactgcttgtttggtcacagcaacaagaaaggtaactcatatatatgcacatttgattgatacgtaaattccaataatcacaggctcactcagcaagcctgtgatgcaattaacaggccctctgcccgagttgctgttttacagtggtcggcagctctagtgggcgtgtgtggctccccactcccttcacagcccccaggaagattttaactcacatacatggggaggtgtggaagttaggatccaccagacccagtataattggagtggagtttattagcaaacagcttacacggggaacacacacacacacacacacacacacacacacacacacacacacgtgcgcgcgctactgaatcttggttcattttgattatgtgtggcacccctggttcatttaactgtttcctctagaggccggtgctcagagcactttaaatgatcacgtgtgatgctggagtaatggaatcattttaatttcaagactgaacggtgttccacacgggcacttgatttgaaggctgtcagggagtcggtgggtcatgcgacactgacaacaggaaagaccaggtggtgaaatttgggggagctatgtggccctgtcactgtatttgacattctccttaggcagcctcctgccccgccctggactctagttggtttctttttcaaaggcatgtttaagacccgcccctgccacatgcatgtgtgtcacagcttgtgtgtggagatcagaggacagcttctgctgttggtccttccaccttgttagaggtgggggtctctgtggtttgacgtgttcctgcttagcgtctactgctggcttgacacagcctagagttatctgagggagtctcagctggggagtttcttctttcagaccggcctgtgggcattttttttttcttgctatttgatttaggaggaccagcccaccatgggcaggactctccctaggctgagagtcctgaactgcctaagaaagggagctgagcaggagggaacaaaccatagtttctgtttcagttcttgtcctggacttccttccctggtgcactgtgacctggaggtgagagctgaaataaatccctcccctaagttgcttttgttggagttttttttttttttttttttttttttttttttttttttttttgtttgttgttttggtttgtttttgtttttcgagacagggtttctctgtgtagctttggaggctgtcctggcactcgctctggagaccaggctggcctcaaactcacagagatccaccttcttctgcctcccaagtgctgggattaaaggtgagcgccaccaacgccctgcttgttggagtgtttgtcacagcaacaggaaaaacaaaaacaaagaaacaaacaaaaaacaaggtggctgctacaccacatatgctagagactctggccctgtgcttctggggactgtcctgtgtccacctgtcctgtgtccacctgtcctgtgtccaccccattccagcgtgggagcccttgcaattacagacttgtaccgccacacccagctttacacaggttccgaggatccaaacccatgcaccgaaaaccccttcacccactgagccgtcccctcagcctgacatttaagatcttgagaggagatcttcatgagagatttggactttctttcatttcttccgttgttcattcttctagaaaatacagtgtcccacggtccatgatgaaaatgtatttcttcagctccatgtggattcgcatgagccttctgtgtagagaagggccactgtgccctgctgtcttttaaccaagttggggttggggctccctttgctctgaggcccagtagaaagttcctttactcttccttgccttccattttctgggagtcaagcacgatgccttgtttacacatcactttgctggtgtgcaccaggggtgttttctggaaggagaatccccatgtgtctgcagagtgttatctcagggagaaaggtggatatcacacacagcgtaaaccacaccacaatgggctcagatgccccggagatgaatattctattccggagggtgcactgcatggcagctagccagcccacatggctaggaggatggttgggttgactggcgtcctctggctcatcactagctaccacaaggagggtcatgtggacaggtgtcaggtgtttggcgcctgttacatgagggaatgaaactgttagaattcacagcatttgtcatacagagttctgcagaaagagtggcctggttaatggtggagcatgaaaaatgaatgacccagagacagatattgggggtcaagcctcaagctgaagatcagaaaagcaaagcagcagccactagctcttaactctgcctcagttcagaccaaaggggcaatcgtcaaactgctccccagattcactaagactgctatgctctcctcaacgtggctatagaaattcctgagactgactactgaagaccctgttcctatcttttatatctctctagctctgggactaaaggcatgagctctattgctcttttagactgattcaatctcatgaagcccaaggtggccttgaactcagagagatccatctgtctttgtctcctgagttctgggattaaaggtgtatgccaccactgcctgatctctatagcttgaggctgactttgctttctgaatcctcaggcaatcataaacagtatgtccccacacagtaggaatttattttcttatggctccagaaatctaggtgaaggtgatgatgaggtgttttcttctgagggtcatggggaagggatctgccccgggtttctctggtgggcttgtaggtggccctcatgtccccttgtgtcttcaaccatcctgtcttgccgtataggtttatctaaatttcctcagtatgacattagtcattcaggatgataccagccaatgacctagttttaatttaattatccatttaaggatgatttgttcattcagagctaccaagtggggttggggcaccaggacttcaacctgtattgtggatggaatctgctcatcccaatgccatttctttctctgatctgctcatcatcatgggctgtgtgcaaataaatgtttgctgtccgcttcttatgctgaggacagcgcagtagacagccaattggtggcacacactgcagagctagttaggaaggtgtttctaaacagttatttaagcatgttcaaactaacagaggaaacctgacatggtttctgctttcccaaaagagctgattgacaggggggtcccgtgacactgagacacacactttccctccctccctccctccctcctctctctctctctctctctctctctgtgtgtgtgtgtgtgtgtgtgcgcagaaagttgggccatgtactgaaagagctaagtagtatagaaaaaaaaaaaccaatatgggaatttgaaaattgacagaaaatgttcccatggtagtttttagccagcgatgattctgcagtctccccgatttttattgactactttttatgttcgatgttcctgatcatgaagaattgagagtgggtaattgggtagtatctttgatatctcctctttgctacaaattaaatgaagcagttctgcttggctatccttttgacagcctggtcgtttccatagtaaaatatgtatgtaaaaatgctttatccagggccttgatgctagcttctctgtagagtttcacctagggaatatgatgcctggattccatactcactggtgcaaaacaagcaaacaaacaaacagaaatgcccttaattgaaaaccatgtcctgttgggaagcaggctccctacttcctataagttttcataaatcacagatgattctcctgcttgttttggaaaatgcaaatctttaaacagctggtggtcacttctaagactcatataaagcaggcgctaggaaacaaagaagacaacagcagttgtagtgactgctccagcggcgtttcaatgggccattccctatgtccatatacgagagaaaaacggaagaataaattctcaactattctaaagaaaaaagtgactcatgtcagtatttcatgagcatcttggtttatgcttattgtttctcatagcaacattttattttcttgggtctaaaaattttctacatcaattatattttattgagtttactcttgccagtagagagtaggcagtcagaatcagaacagtaaagctggaacctaacctgatatctcagtcttgcaataccagatagctagaaggctgaggcaggaggattataatttcagaatctgcctgagttcaaggtcagcctgggcaagttagtgagaccctgtgtcgaaataaagagtaaaaggtctagggatggagctcagaggtggagagcttgaccaatttgtttcaggacctaagtttaacccgagagcctccacatgatgaatgaatgaatgagtgaatgaatgaatgaatgaatggataaatgagtgaatgaataaaacaaaacttgaaggcatttgcagaataatagcgctatcttccaatagtgcctggtggtttttttatttgttttgttttgtttttgtttttgtttttgtttttctgcagcatgcaacactggtttgttctttacattgcccagttattttggtggacaggctatggcgagacatattaggagaatcctgtgggtgttggcaatagtctgaaatacccagatgcagaagcaggcttgtctggttattaagtagctgtcttttatctcactccttggggcattcaggagagaaataattgactgtaactgatttaattagccgaatgcactttgcattcaccagcaacccaaccctgagaatgctgaccattcagtattaaatgtggctctgacttgaatattgaaagtgcttgactccagacttagctctggattttgtccgtcctcagctcttctctgactgcatcaacagaactccgactaggacaataaaatagttcaggacagaaattatcctcactgccagcttattgcagtagtcccagctattaatatatagaacatgctgcccagaggagctatgtcaagacagacttttaagcagatccgtgtcatcttaactctcctttgtggagactttaagtttgaggctgacttcagagaagccccatggcaaacacagctcctagaattcgaagtagagaagtagagaacaggaaccctcgagtgtgtggctgatgggcgtggtgaatccaggtggcttctagaccatagggtgggtcaaggacatttgtagccctagggatgtgtggtctccacagacaccagggctggcagagcaatgatccatgtgaggcaaaaaggaaaactggatcaccatgactaggtcagtggtgttggttcaagctttagagtctgacacccaggcagtttatctcagccgtatttaaggacagcaaacatttggtaatatgtttcctgatgttgtttaactcaatcctatatgtacagcaaacttaagacatgtttacattgaaagtctttgcaaagtacatacagcttctttcttaaagatggttctgttgactgagaaacaattctgaagggtctagggagaatgatggaggaaagcataaagtcttagggagttgggtgtggcctggccctactgataacacagaggttcctacgctgttataaagtgcacggggcatctcccctaagcatgggctctactgactgagaaacagtgctcaagataaagcctgggtagggagagtctgggataaacatagtctctgggctttggatgtggccctgcctacagatagcacaggccatcaggccattaacggcacacattcccagctgtctgggtggaaacaggcttgcatctcctccgttgaggacacaaccctgtctgtttaaccctcccggtttccctggtgctcatctatgagcacaaggaccttttgccctctacaaagggaaggtcaagggatggcattttgcaggattggtggggaagacaatctagcatggaccccaccacggcagacttttactgtagacaacgctggcaatagtgcttccaaatgggaacatggcccaagagcatcactcatacagtcttaagtattctgtggcccctgggtctctccgaggaattctgatgcactggtttctagcgagtcggtgagaagttagttggttcttgtgtgaatgagaaaacagttgctcaccgtctacatacagctatgataaaggagcttttctctttgtgttggtctacacagaccaataatgacattcagagtaaatttagaaaatgaaggttttgctttgtggcagagtgaatacctgccatgcaccaggccccagatttagtcctcagtgtcactccatatatgggcgtggctgaggacagtgtcaggagtggagacatgggtctctacggttctcattacatcacatcacccctgcggtttcttctgcacctaggtttccgatttgctgtctgtccttgatgcagacagctggggcaggtctcaaatgtagttctgtggcccccaaacagaatgttggcacctctggttctgcttacatgtgtttgttagtgctggggtttggcgagcccatttcagttcccttcttctgggacttgagtcacagggggagtaggtgatattctggcggatgacaggacattgccgtcacatccatgtggaggagccaagaggtagatctgtgtgttcacaagcatttctcccagactcaaaaggacagcatctggccagagaaaagcccagaatcctcctgcctctgtggtccaccacacaagctcctcccaccagagaagggttgttctgttctctcagaaggactgagagattgcgacggcactaacacaggacagccctgcacctgcatttgcccatgaggtgaggggtaaggctactcctcagggttcagtgtcctcacagtttgtccatgctgaggccaccatcctcagagaaatgccgtgggtgcctggttttgtaggacacaatcgagttctagctggtttcttcatagacgtatctactgctaaacttcacatggtgtccagttcccccatcctgagtctgcttctttcactcaagacagaggaccggtagcagaggcgttccacggcagactgactgtatgtcctctaagatgagtatttggagtagtttgtcccagcaagtccaggagcatacctgaattgaaagggattcaatttctcctcccctgtgtgcctgattaatatttttttaggtctcagctcagagtcacagccagtgcctttcgtgatgaggccgtccgacatagctcttcatttgttgatgtcttagggagtttcagcgagtgcccactgttggtctcactcctgttaccatggtctgtcttttcaataccactgtgactttcatgagactcagagctccgtgtgttactttgtttgctgtgtatatggagcatcttgggctaacccaattcaataaagggcacagcttccgtgacgagaaagggaatgtggcaggctgcatcaggctgagagcaagggcccagaaactgtttaccactgcagtgggcaacacacgactcctgtctggtccccgaatgtcagatcccagcaggattgttgactgtgttgacctcagttggaggttgggtcctgggactggggttatactggtctaaaaggtgggtgaaaattgtgtctcatgaatggcctgggaattgacagagaagggacacttaaaagatttatgtttactgccttaggtatagagatgttttgtctgtatgtgtgtatgtgctccacatgcatgcagtacctgtagaggcctaaagagggcatcacatcctggcacctggagttgcagagggtcctgggctgccatgtgggtgctggggattgatggccaaggtcctctgctagagcagccagtgctcttaaccactgagccatctctccaggcccttttaagaagtttagaagggccaagatcatcgagagaaaaacacctcagaagatcaggaacattgcctagtgtggagtacacaagggaatttctgcacattgttcaggacacggtaccttgtgtggagtccccatgtgggctatgaggctgtttttctagtcctggggtataagtatggagtgttccaactaccttctggaaggtctgatagtcagagcagtgagagtgaaattcatcttgcagttagtgaacttttttttttttccagacagggtttctctgtattgttttggaggttgtcctagcacttgctgagtagaccaggctggcctcgaactcacagagatccgcctgcctctgcctcctgaatgctgggattaaggcgtgcaccaccattgcccagccagttagtgaacttgaacttactggattgaggtttttgatgaggactggctcttccaggcttgtcctgctacaatgacattggtgagagacacccaagttggagaggtcagtagacgaggactgtagctgtgcaggctggcgcttctgaggtgtgtgtgaatctggtttctgatcaaggatgactttgtatgcctgtccccaaacccgagctaaaaagtattaaacagaagatgtagaatgaaacagagatctgggctttggaaagtcttggtgatgcagaggtcacagaagtcacagaggtcatggggacatgaaaccgttgctcccttgctggtccctgtctccttggctcacctactggtagcaatatttacactgaaatcttttaaaaattacttattattagagcagtgcttctcaaccttcctgatgctgtgaccctttgatatagtccctcttgttgtggtgaccccaaccataaagttatttcactgctatttcataactgtaattttatcactgctatgaatcatgaatatctgatatgcagggtatccagtgtgcaacccttgtgaaagggtcactccacccccagattgagaaccactgtggcagaggacaactccgtgaagttggaacctggagatcaaactcagttaccaggctaccatgactgtcttgtcagccctggaatcattttttaagcacaaattatttgtacaaaataatggctttgtttttggcattctcttgcatgcatataacgtattttgggttgttttcattttttaaacatttatttatttatttaacatcttgactgcgattttctctccctcctctcctcccaaccccccctctccctcctttctgttaatgaacagactatagagctgggctgcaataccatagcctgccaaaaggtgtcattgttccataaatgatatctcagggtagctgactagaagcctttaaattatgtaaatgtttttatttcctctcatttatattttgaattctcaccgtatgaacataaatattcaaaccagaggagatcaaaagctgttttacctaaatctagttacaccaatatagtcaaattttattcagaattctagtcattggtgttaatttcatacagttcaccactgcttaattttagctactgtaatactaagttaccacctttggtgttattttgatatttggtagagacataggtacatcttggagtgataaaaaagtgtgtatttttgactttttttctgtgtgttttgtgggttctctttgtgttcagacgagttttccgtccttatgtcacattcacaccaacacagattctgtttttgaaaataacaggcatatatttgcctcatacctagggcagggtcactgtgtgtagatagatttttaaatatttgagtaaatgaaagactagagttcatttggcattcagtgtttttatactagggacccgaattagtaataaaatgccagagaagacaaggggtgggggggggagggggggggcaggtggtgggggatgggggtcgggggcaggtggtgggggtcagggagttgggggagatgtttatacacacccatcacatacatgtgtgtttgctcagtgttaacaagcctaataacattacttggagactagatatacttagcatctcatgatagcatgtgttctctctgagccctgggagcaaaagcatgcatatctgatatttgggattattgttccctgggactcatgttgggagaagcatttatgattgacagctggctatacctgttgtagcatcttaaattaccctatgtagtcccaatttaaaggtttgtttgaaagggcggggggggggggggggttgtgtagtgtagttttgacacctgctttctccaagacttgtgacctccgtcctgatgtgatctgtgttccttgtgattggtgttactgaattctgcctagcggtaggcagggaatagtgcctgccttgtttgctgccacgaaaagtccccaaacacatgactgcacatgaggacactgcagattagagctgcagggtgtggctgggggagacacggacagctgagccactgaggcgctgagccactgaggcggcggctctgccaacagcagcatgggttatgtaaggcctgcagtgtctggagctgggcttcactggagacatgtcacgtgtgtgcaatgctgtgggtgacccgtgagtctgcctgagataagcttttgcagctctctgtactagaaagcagatactgcacataatctaattccagtaagaacagttgctgtctggctgtcctttgtctgtctgtgtgtctgtgtgtctgtgtgtctgtgtgtctgtgtgtctatatctcgctacgcttctgaagatcaaaaattaagcattatgtaatgtggataaataatgtagtgaaaggaagcaactcagttctggtcactagagaacttatccccacatcacttaaaaatgatttttacaacgactcagcaattattacaaaatacatagtatttgggcattgtttctgggaatttatgtagacagctgccatcatttcccccaatgccatgatctgtggaggagagaaagggagtttacagtttagggaacagtactgagaaagaattttaaattgtgagctcaagtggaattttaatttttaaggtttttaactttatttgtgtgtgtgtgtctgtgtatgcaggtgcccacaaaggccggaattgggtgtgagaccccttaagagcagcggttcttagcctgtgggttgtgacccctttgggggtcaaatgatcctttcacgggggtcacttaagaccattgggaaacacagatattttttacattatgatttgtaacagtagcaaaattacagttaattagcaatgaaataattttatggtgggggtcaccacagcacgaggaactgtattaaagggtcctcgccacgaggaaggttgaaaacgcctaccctagagcctttgtcaactacagacccatcttcccagcccctcaaacagcctttcagattttatctccttactgaggttatggaatcgggacctgtcagaaatgaaccctttgtatgcagctgagtctctagactgcatctcccagaaggagatctgggtgatgccggaagacagcagcggtcagtgttgggagactgaagcctgggaaagagggtgagggctctttcatgtgaccctggccttaaggagaacccagaagatagccaaactccagcttggctttcctgaccacctctggcttccatgctaatgtctgtgagcagaaatcaaaggccctgaacccaggtgcccggagtcctccagtctgctgagtcagcagggattagtggcgcaggtctgtgattttgggtggattctcttaaactatagcaaaaccaatgttgtcctattttttccccctcttacgaaggtcttttatttttgtcttattctttaaaaccttcttgggatggtgctggtttgttgaatgccactttctcttctgacctcttcatatgtagattttgtctaacagtcaggcccagattatcaccattagctctttggtagacgacctcacccatgtggaacatttgacacacacgtgtgtagcttactctccctgtcgttggaatgcatgtttgtaggaggcatgattagtccattgaatgaaaggaagctggacagggccaccctgccaagaggtgacagggtgtgggctgcaaatggaccctaagtgtttcacccggctgtgtgaacggtccacacccatggttactttccagggccgtgctgactactttcatttaggatgtaggtcccagaaggtctgcttttatttttttaatttccgtgtgtgtgtgtgtgtgtgtgtgtgtgtgtgtgtgtgtgtgtgtgtgtggggatgtttgtatgtgtgtggatatgtgtgggcccaagatgaatatcagaaggcatcctcaggtacccttctaccttcttcctgaagcagggtgtggcagggagaccagagccctccccatggggctgctctcccagcttgctgtgcggctcccggctcccgtctgcctttctgaggttgcaattagagcacacttcccatcattcccttggattcagggagccggagccccgccctcaggtttgtagggaaagctttttgtcttctgagcatctgccttgctagccccaggggtgctctttaaataactccctgggtggctctgatgtgacaggcatgtcagctccctgtgtatcggcatcagagcacagacctttatgctgagcttgtgatgtggatggaaatggttgaacccgccatgtctggggcagggctcagtggtgaagagcacatcctctcctgcagaggacccttgctcagtttccagcgcctcctggaggccacaacttcctgtaactctggctccaggggatctgttactttctctgacttcttgcgtgttcctacatgcacacagtgtatgtccatatactcaggcacacacatatacatataaataaaatagatattaaaaaagaattttgtctaatgtgattttgtggtataagccactaagagttaacccagagacaattccaaggttatgggagtgtgtgtgtgtgtgtgtgtgtgtgtgtgtgtgtgtgtgtgtaggttatatgcaaagaccatgctgttttacacgaaggcctttggcactcagtgatgggatgcgcgcacgcgtgcgcgtgcgcacacacacacacacacacacacacacacacacacacactgagtgtacatgtatgtgcacatgtgcttttccattcaccctgtatgcttatagccaaactatgcacatagttcattccttgttgtttcttggcgaaagcatagtagaaactataccttgttaggacagtcacccagtactcttcggctaaagctgtggtgctactctttaacagctgaaaggacacagtaggaaatggcttgtgctataaaaaggctagctagcctccagctctgaaatcgagactcagtgtaacttggttaatgagcagattcagagttggtctaatgagttgctgacggaagggcagctcgttatcaccagccagtgaagttttgctcttacatctttacacagtaataaaggagctggctgctctgcctcctgccattgattctggcttcttgtttatatcttttcctggttttatttaaatgatagaatagatctatccctgggctggggtctgggctccccaacctctttcttgtattcacccccccccccacattttgtttgcaatgatcatcttgttttatgtttccatatttatttcaaaggtggggagtgttggaaaaggcaaaattaagtctgtgattcaggacccctcagcaccatggctgtggccttgtaagcgtcgtagaggactctgaggacaaggaatgaatgtaaatgtttttctaagaacgtggtcacaatggtgcacctgtctgctgcacaacaacccagaataaggtttatattttttaaatttaaattttagtatgtgtaccacataataaagcaacccttgaatattattatggttgctgttattttattaccccacttatggaaatcttatgacttgtacacagacagtggtagaggacttcgtggactgcttggttagtgctgctcatatggccatgagtgtgagctcatctatggacaacctaccagcgaccgctcccttcctccagcagccatcaaagtagctgtcagtaactcctgagctgaggcgaggcctcagtagcctgtctctctctcccatgataggactgtgaagtgtgccctgatcatgtgctgtggtgactcataaccgtctcacccagaaggcggcattccgcagaacccctcccgtgctcttctaagtccagttctccctgggccttgggtgtctagtttgatggaggtgggtcctgggtccacctggaaatcttcttacaacttgtacgcaaaccatggtagagggctttgtgggttgttgatactgggagagtcaacttttctttgcaaatgaaccaaatattgtggactttgcataaatgttggagatgcccaaattgtgccctgaatgaccatggtaacgaggcaaaggaaccatcgttagggatcttgcttgggtggagttcatttgtctgcttctgtccatagaaaggaagccgctggggacaaaatccacatctttctggcattttccaagaccctattgctgggttaacagagtatcccacccaaaaagactgtgctcagctaccccagagagggatgtgtgctgttcctctgtgaaccgattctctccggttcttaggtgcttccacaattttcaaagttacagcagctcatagaagatctagaccctgcagattgctaaccagtcaaactcacaaacagtctgtgcttagaacgaaaaagagttctttgatgtgtcagttgggcttgaattaggatatagaaaagaaacgacaccttaacaagaaataacgacgtgaacattcaacatggaacggaagcagtgcatgtcagaggaacactaatagcaagactcggtcacggtaactaggaaccgaaacaacagaatgctaagagaggactctgaagtgcccgcagcagtttcagaaagcagccgcctgtacccagaatagagcagagggctggactggaaatagcagttacagagcctgcctgtgactcagtcatggagcacatgcctgtccggcatgcagaaagcctggttcgatgttctccaccgcatgagccaggtgggtgatgcacacctgtcatctcagcactcaggaggcggaggccagaggatcagaagttcaaggtcctcattggccacataatgagtctgaggccagcctggatacagaagaccctgtctcaaaacaaagccttggaggaaagccctgtggccgcctacctcagagcccagaggcaagtgccatggacagagttttctgagggaaaggcaagtcactctggtcaagaaacacccttgacctagaagaacttgtgtctggggtgacataggacacgtacaaaagcaggaagccacatcagagccaagtcctgctctcccgagctcatgtgtggtgcaaaagcagttgcttggtcactaccaggatgtttctctgagacccttaagagaactctcgcaattaaagattggcttaaatatacaatttgatttgttaacacatggcaaactataaaaatacaatgaggccaggtcctctcctgccttcttgccctagccctggttctccccccccccccccccccctctctccccccccccctccccccaccacagtcttttgagtcttttcccccagtgttgttagcgtcttaggcgccctttcaagtgtgtgcagactcaagccaacactaatgcagacccttcgatgctataccacatcccgctgaacacagaagggctttacactgcttccccaccagcgtgtcttcccatctcccctgatctcttcgtgttttaaatctcagcactttgagttttcctactgtttttattgtctttggtacttataggataaaggggtttatctaaaaatactcacagattaaaaaatatcttcaagtcaagtcttctggctaattgttttggactgtacacatagcacacgtaagatatttaagatgatagcagacatcttttttgtcatctcagcttcattgaaagtgtctagtatttcccaccaaatgtaatactggcaaagcgtgtttcattttgttaacgaatctcctatctgcctctctagttctcgtcggcctgtctgtctgtttatgcatattttgtgtatacgttgtaatcagaatgagattaagtcttgccagacggctccagagcatccctgtggccatgaagcttttctttttatagttatctcgagcaatgtgttgccctgaactcaagtttggttaatgtttcctgacacttctggtatcgagtgtctttgtggctcctgggacaaactacactgggttgtggaattcagtggcaacacgagtacatctgagcgtggggtgatgtttgtaaatgtctagatatttttgctctcaatcaggatttttaatcacttttacttatttcataagacgaacgtgggtagttttcttattttcttctaacctgcagcagtaccatagcactgaagagagctccttgtacatttggtggaacttccctgtgaaacactctgagcttgggattctgaagtcattcctagacagttatttcttctgtagaaataatcctgttaggccattttctgtcttgtttgatttgatttgggcaaatcacattgttcttcaaaactcacacattttatccaggcttgttgagagttaagttggtcagagcagatcttacaattattctccatttcttttgttttctttttttccttttcagaatgttttgtgtaaagtctgttctaaaatcaggctgtctggtggccagcgtctttctgctttcaaagagtgtgtttctagaacgttatcgttgccgtttattcttccagcaccgcccccacctgcttctgcactgagccccgtgtctaacaaccagcttccccactgactcctacgtctgtgtggagcccacagtctcttccttctccctttcctccttccttctcttccttctccctttcctccttctcgtctcttatgtttccatgcctttctagaaattctaaggtttagtttgggtttactcttgttttcaactaaacaacgaaaccaaacaacaacaacaagaacaacagtttgcagtcatcctgtgggctgtcagttgtgtgtctccaggcttcctctgctttggtacatttgtgcgctgtgtccttcaaactctgtcctggtcgtcatcgtcatcgtcttcttcttttccttttatgttcatttaactttcggaggaattgcttatgttgctttgttttctgcacccctcagcttcctagcttggttttgtcgctaattatttgttaatttctgaagacatgattattactttaatttcctaatatttttaccatcccttccttaattatgttttttggttgggtttttgcctttttgctttgcttttgttctgcatagtgatattgctctaggggtgatgacagcatcatttaagagtgatttatttatttttattttatgtttggcctgcatgtatgtctgcgcaccatgtgcctgcagtgcctgtgatggccagaagagggtgtcagattccctgggactggagttacagatgtttgtgaactgtcttgtgggtgctgggggttgaactctggtcctctaggagagaagccagtgctcttaaccggcgagcaatccctctgtctccattaacaatagttttacccagtaaaaccagcaaaaacaattccaattattttccaaaccatattcttttctatgtgttgtcaataaccacatttaaagaagctgtggctaaagattgctttaaaattaattttcctgttaagacatagtttcttagtagcagaaagaaatagatgaggtggaacccaagctcctttggtgggctgtacatagtaggtgagctgcacacagtaggtgggctgcactcagtaggtaggctgcacacagtggcagctcctgaggctgaaagctctcagataataacattggttacataagtcacccaggatggcccagtgtactgttatttccagacagccctggaagaaacatgtgccaggcaacaggccgtcagacgaaacataacaatttactttccgataattatctttgcttagagccaggttgggacttgattgatccagtacagagaaatgtcttcttgtatggatttctttcgggattagaaatacgactgccatgaatattcctgtgaatcactaccagggcttcattagaggaggcagctgtgtgtgagtgcttcttcgtcctttgtgtgtgagactcagctgatacaaaccctgacccaaagtgtccaccattgcccttccctccctcccatttccttttttgtcttttgaaacacgccagcgtgttggaagccttttccgtgaaaactgacaatgctaagagcccaactgaaatttacttgctagttgacgaatcacagttcacacagcagcacggctccgaggcggaggctggacccctagctatactaatgaggggccttcgcttctcccaccccacaccctgtgctgtctggggctgctctgtggtcctgatatgggccagactcaggatacccctgctttcttcaggttactgtattcgaaggtggtggccccacctggtggtaagatcagcaatgcagtctggtttgctctgtctccttcgtatgggggaagcctagccttggcaagcctcggctggcagtaaagctgagagtcatcttctgtactattgacaaatgcaggataaggtttggtggtcttttcgatactcacgttgcctgggaagaaaagctcccctcaacttctccccagaggttagactaggagcatgtgcgtcctaaggagtctctattctgatggaagcagagccctttcaggtgcaggctccaagtgactctcataacccatgaggccttgtgagtgtctgcgcagaggcttagagctaaaatcctctgctggctgggaggtctgacttgggaaatgaggcagagggcaggggaggcgaagaggtaaccatggattcgttcccagtgtcaaagccacagactgcactgacttcatcagagacacaagaaccagtgcatggcccggcttttctgagttctgaaaacaacgtttaattatgaaccctgaaagtggaagtgtacagaaaggattggaaatagaaaagttgaacgagacacgcttagacaaaaagtaccgactgtctactactcagtcccagagacgcactggcaagcaattaattacaccctcagagtttagtgagaaaatagtcatgaaccaaatatttggagagggattgaatgctttaattactccaggggaaaagttcagagtgttagacgggtgtgtaacacgggataaggctagaaaggagtgtccggaagaattggcgtgacacgataaggaacagctgctgctcggccgtgaccaccctgtgatggtggtgtcagttgaaagtcctcttcctctgagaggctggacacccaggggcagaagggcagcagggaaagaaagagagtggtgagccagccgggggacagcaggtcactgcagggaaggatgctggcatggggtgatgtccgtgctgttaggtgttctctaggctgagctgtttttttgtgaacatttaccaagctctgctctcagcacttcatgtgaacattttctgatggccgccctcacagttgtcttcatttcatatgaaatgaaaataagctgtgttcttaaaaaacaaatagttgggaaggaaacaatacatggctcaaaagatggctcggtcggtgaagagcttgccctgctaacacaaggaccttagctcccataatccccagcacccacacaaaatgccaggggtgatggtgtgacctgtaatcccggtgctgggaggtcagagacaggacagttcctgagtcttgctagtcagccggcctatctgagtctgctaactccagggtcatagaagaccttgtctcaaaacaaatacagtggggaaatgactgaggatgacacatgacatcaacctctgcccccacatgcatgttcacacatgcacacgtgtactgcacataaatgtatgtatgcacacatacacacacatatacatgcacactgaacaacaacacagttggttcttgctgctaagcaagttgttggcttcctgtgcgtgtcacatgagagaatatctgtgacatgcttctggtacacagtgcagtgttcatttaatttgattagaactttaattctcatcttgcccttgctggtctctctacaatgtctagactgagagatacaaagaaccccactggcttcctgtgcggctcactgcctttgccgttttatgacttgtttggtagtggatttggggtcatggatgaagctgatgtcaggatttggggacatggatgaagctgatgtcacagtcagctgatgtctttttcctcctctaagcatctttgttattgttatagtttctgttacagtgtcttgctatgtagcccaggctggccttgaactctgtagcctaagctggtctccagctcctgatggtcatcccgcctcagcctccttagtgctgggatgaaaggtatgtgccatcacacagtcttccaaactcctggagatgtaaatcgacaggctggtcaggtctgaggtgtgggaagtgtctccattcttagggaagctacacatgtttgtctcatgctttgtttaattctgaaactcttggcgaagactgctgttgcttgtacgccacatctggaagacatgtcgtcctatttcatgggaaggaacagcgggccgtgggcggaggagcctgggtgtaattacagtgtgcgtttatttggaaagactagcatattagcatgcagtgggaggattaattaatctcagctggaataattctctgcagttggtttcaataaaagctgaatatctttaagcccttgaggttcgcattaaacttatgatgaaagatatgtttcaaatgtccctccttctgacacgagtcctaaacggacatccctgatctgagatccggcttttcctacctcctccaaaccttacctactaaccgatgaaaggaagtcaggcatcttcaagaagatgagggttttttgttttgttttgttttgtttttacgcttaaaaataaatattttgcaaagcccgatttccacaaagttgtgtatgattttgagtttctcctccgggtgtgtgaggtttccatagaaactgcctcgcctgtcttcagagccatggactgtcttcccacacaggtcaggaagcgagcagtgccagcccccagctcagattattgtgctctcccaagtggccggttcctaattggcacatgcaattccatatttaattagcagtacgagtctcactacactttaccagcagatgtggcatttagaacgttggccatcctcatgcagctgttagccagatgtgcctcagagaggaggcatggtcacacaccacagctcagctgcttggcaaaaatctgggcagaggcagcattatttccccttaagttaaaagaaaaaagtaattttccttaactaggctagtggacttattttctatttttataactgctttattgagatactcgtgtcataaatttgtcccaccagaatgtacaattcaggagttagtttttctccctctctcccagtctttacagcaccagctcctggaagccagctgtctactttgtacgaatctttgtgaattctcctgttcccgatatgtttttttttctaagttttttctcattgttcctgtgctgttctcagggcttagccatggggaggcttgtgttagtactctgggccttttttttgagaaataacacaccatggtatgcttatagtgcatgctactcgcctactcatcattccgtggccatttggggtgctttctgctctttgactgttaggaatgctgctgcttctgctatggacatttccataccaggtttttgtgtgaaattcttttttgagatcaagtttcattatgtagttcaggctggcctcaagctaccaattcctttgcctcagccctcttgagcatgggaactatagatgtgaaccataccctgtggtgacattttgtttatgatctaacaaataaaacttgcctgaaaatcagagcgcaaggccagccacactagtcagtcacagaagctgggcagtggtgacacacacctttaatcccaggactcaggagacagaggcagatggatctctgtgggttcaaggccacccagggctacatgagaatgaatccgtctcaaagagaaacacaggtgatctcagcacaccggatccctggcctttaatcccagcactaaagaggaatataaggcgggagaagacaggagcagaatgagtctgaggtttggtggatcgccccttcgttctgctcatcggcagaggtgagaactctctagtggctggccgatttgtttctcttaaacaaaatatcaccacaatacccaagtttttttttttttttttttttttttccccttggtcatgtgctaaggagtgaggtccctgggtacaaacataactctgtgtttaatgtgtggggaccgtgacatagttcctccgcatggctgctctattttgtatctgacccataagttatgaggttcgtaatttgtccacatccttgactgtgtgctgcattgttaccttgtaaatcttaaccatcctagtggatatgaaggctatccaggggcatttttttttttttaaaaagaaatcaatatctagttcacaaaccagttaaatgcttcttatttatgtttccattactctggagagttgagggaaatgcacttcttgtgtatatctacaatgttattttcttttctgattttaacacaaacccaactcagggaagatgacgttaaaaaaaaaaaacaaaaaaccgatgattctgggagttggactatttggtaggcctgtagtgtagaaagaggaaagtctctaagcactgtttgaataaaaggtaaaatcttcaggttcctggtataatttcatcttacattagccaaatgggccatacagtggcatcatacagtggcgtcatggagtgtgaagcacagtgacgctgggccaaagaccttcagacagggatgcagctaggtgatagagtgcttgcctagcgtgtgtaaggtcctgggttcaatcctagctcccaggattgaacaaatgaccctgatgtttcactcaatatattttatcaggtgtaagaccaaaacctctcgtatcactaaaaagcaaatcaaggcttccagagtctgtagcacactgttgactttaaagtgacctgtagttggtgaaggtcagtgttgaggaaaaggtgtgtgctacagctaatgacacacggcagcacagcctcccgtgcaccgtgggatcttaatgctgcattgagttcatcaccaccctgtacacatacgtgcactctcagcccatattgggagcatctgtgtatctgtatgatatatacatccacacatactagagacagaaaaggagggaggaggtaatgtgtcggctcagcctcgacagactgaaatcatcctcaaatggctcactcacctccagtcacacttggtttgagttttcttagcctgtgaatagtgttcatgtttcaggtagaaactgatttcaaaagcctgtgacgatcacgtgtttgatgcaactggggaggttggggaggttgcagctgcggtccccaacagcgtgtgtgctgtgcactggctgttgttaaaagtaaataaagtctcaggactggggcctggcttggtggataaagctcttgccatgcaattgtgaaggcctgagtttgcatcccaaactcgtggcaaagccaggcaggcatgtgggccacctgcagtcccgctcctgggaggtagagccacggactcctcagaccaggctggctaagcagaccccagaaaacgaaaacataaacttcagtgagagcctctgcctcacacacaagacggagagcaagggttatggagacacacctaatgtcaagctcaggcttccacacacatgcatgctcacacacagcacccctacacacgcgcgcgcacacacacacacacacacacacacacacacacacacacacacacacacacgcccacataggtgtgagcatcacacagaccatatgcacagacacagaaacataagagaaggtttcacctattttagcattttagttactgttctagatacagtagtaaaatacctgtcatggcataatgtgtgacacagagtcaagatgattttcagtactgttcaaaagcccgggaggcacctagcccaagttctgaacaagctccgtcctgaggcgggcagccagcagtgcttgggcggtggcattgttctgtttatttgaactgagatctcattttctccaggcagtaaccgtgtctgtgttttaagatgttgttagatatgtgagaaccctgttgtttattcctcctcatccttgtctgtgtttttgctgtggagtttttcaaaagtcatgctttctacacagaacacaatcaggagctcacgagagcatggactattcatattaacaggaaaacgtatgctcttaggagcaaattaatgtaggaaattattaacacttcatgcctgtaacactcaggttgagatcaggctacatagcaagattctgtcttaaagataaaaacaaaaattaccaaagttagatcaacatgattcatacagtattaaaaacactatagttgtataatacagacttgcaagaaatgcaacagtttttactttgagaatcacatgggttgacagattgcattaagaatattttcttttagaacagcattttaggagaacagtggctgtctgtctcattacactcacagattcacgtgacattgagttgttagtttgggaaatcagaacctcaagatgggcctgtgctttttagaaaggtgaaaatcctgggccagttgatagcacagcaggggtggatagggctgggtgagtatgcaggggagcaaagggctgtgtgagtgtgcaggggaggatagggctgggtgaacaagcaggcatagagatgagaacaagacagttagtactgcctctgatttgtcttcccttagagatacgtggatatgtagagtggtttttatgcagcaactggaacggcgcctgtctctgtggcccaggcattctgatgtccataccctcatcacttccctggacaaaagcttgcttttctttaaccattaaagagaatgctcaggagctgtctgcttagaacttgatgtagccaaaggcacaatgtttctcacatatataacccccaatctttaaataatactgaggtttggatattatcatgcacagtatctgtaactgggtctcaggacaggtcagtagaattcttgagtcacagtgctagtatgtagctaaacccagacctgagccaggtggggaggtccacacagaatcagcaatttccatcatgtgtgtgaccttgcagctcaggtgggtctcccaagatgaagggctggaccgtgtgtgtgtgcgtgtgtgtgtgcgtgtgtgtgttcttaattctcaagaacttcctttgaagttgatctatgcagagttcttcatttcatagactccacgattatttctcttctacatgaaaaattctaaatttaacctgaatttattaaaatttagcttcctgtttcctttgtcaaacatttgcattgattgacaggtattcaactgttgctttgctcctgggtgcgaagtacagtttgttcttagtgttggggtatgatgagttgtttctcattcttgtgcacatcggtatgtatgggtgtgtggtgtgtgttgtatatgtacgatgtgtgtatgtgatggtgtgtgtgtgtgtgtgtgagtgtgtgtgtgtgtgtgttgtggtctataaatgtgctggtgtgtgtgtgtgtgtgtgtgtgtgtgtgtgcgtgtttctcagtgtctgtgaatggaggggggggaatggaggtggtggtgtgtgtgcacatgtctgaatgtgtgacggtgttatgtacatgtgagtgcggtgtgtgttaggatgtgtggatgtgagtgtaggggatgtgttagggtgtagacagtgcttatgggtggggtgtgtggtgtgctcctgccaccctgttttcttggataactctcctgagccatgagatctcacaacctggccagccgttcttccctggctgcacatacagaccacagcctgcagctcatggcttgtactccaggaagacagaacaggaaaaaaagagagtgaggtggagcctctggccccttgtatctacagctcctttctccctgtcctgccaggtctcagggaaggccagtgtgtctgtctgtactcaggaaccatagctggaggttcactgtcccaaccaccacaccgtctaatagaagggaaatgggaattagcatgaacgagatttctctgaagccagtttgatgtgtcattagcatcctaaaaacaacctgtgtgagtgatgtatgcagaggaattctccagaagacagttgggacttcccttgaactagtatgagaaagccagctgctcttgcctgtcttgtgggaaaagctccttacacttccttttcttataggaagcactgggtgcctattaaatgttccaatggggtggccatgccctgatgagtccttggcaaccccgtgctccccacctggtcccgtgggcacctttaaagcactaggtggtgactttccccagttcaagaggaagaggcctgccgtcaggtcattgccagttccttctttgttcccacttcctccctgggccttggggacctgccatgtacaaggtcattttggacctccgaacccttctagctgcatactctggaagcttagcagtcacccctaggaattccacattggcatatgaacacaggctgccattggccactttggttagatttccgaggcagcttaaagagacattgggcagcaaaagaccagtctgacctcaacagatgggactgtctatttcaaaacagccagtggcagacactctgtcaagggcaagggagtgcctgcaaaggcgggaggggatgcctggagttttggggaatggagggtgaaatgtagctgctggggccgcactcaagcctggagtagtttgctcagaaaagggcatttcatctttagaggttgtctttccctggctgtcaggatgcttccaggtctacccaagctgacgagtcgatgatgtcatcattaatgggaaccccaagtcaaatgtctttgccagttgaaggattagagtttgaggacgttggcatatggtgttttttgtttcatgaagtcttggttagattccttctaatggggaacatgcatccgttcactctttaagggcttgggaacaccctcagactctcacctcatagcctttcatgtctaaaacgtcaaacagtgcactgtttttcaaagtgagtgaaagcctttatacttttctaggataaatgcttatttttctccattctgtccaccaaagccagccgcttctgggctgcttgatttctgataccttggactcggcctaacatagcagggagaggccaggaaatcaaagagacccggccatcttcccatgtgtccacatactgctggcacgcctcttccggacatggacatgactttttatggagacattttgttgtaatttcagaaggtggttgcagttttcttggctccattaacagttcgcacatctggaatgtgttcctgtgaagatgttggctggaatatgtgtcttgtggcctggagttgcctctgacagaaagacagccacagaggacagtccttgctagtgagtgggcctagcccagaaccttctgtgggaggcccgcagaggaagacccagcacagaggtcacgcagctcagcccccgtgggattatttttaaaatggcattttgtatgtttagttctgtccttactctctgccgtggcagttatagcttggaaaggatttaacaacccttgcaccagactatctgacagattctacaattattttatttggcttaaagggatttagggacatgtctcacactgaagctcctgactctgttccctgccagagagagaacagaccacggatggccatggcaaactgcggcgcagcacttgcctctggaggaccaggatttgataaatgacgccagcgtgtgccagcacttgtggtttacttgtctaccatgatgaagtagggatgactgccttagctaaaaactggccttcaaaccaagatagatttatttccactttatttgaaattatggagatattttctatagtgatgtatgcattcgtatttaggcacctgtcctggcccgcctttggagttctgacaggatttctgtgcacattcactattgttcccttttaaaagggccctgcccacctccctctctccgtccctccatccctccctccatccctccctccctccctccctctctctctctctctctctctgtctctctctctctctctctctgtctctttcctctctccctctgctcctggtcctagaggccagtctcacccctcctcttttccccttttgcaatccttttcccttaataaaaaaaccctgctcttgatttgtcacatggtgtctctctctcttgagtcgctttttaaaaattacaacagtatgtacatgctttggactgacttttctgtattcactcactatgattaacagggaaaagctagggttttgaggtagttgataattttttccctcttctcaatataaacttttcacttctgtaggaaagtttggtgtgagctcaggaaatgtacatcagtgcaaagccctgtgcttctgtgtgctcggctgtgttacacggcagggatgccattgactttgctcattgactttgtgtccgcccttagtccacactgggaactatgccgatcacagaagccacaggaagaagggtcaactactgcttcatttgacagctgagggctgaggctcagggtggtgaggtagcttgtgtgagatcccctggttaatacagcacgcagggacatttgaacctgggcactgtgggtccataggaggctcaatcgctgtcttccccattctgtgacattctgatatttgtcgggaaatgcaccgtggaccttctgagtgctgtggacccgtgaaggaggctttcttggtgactggtgcttaccagcctgttttacctgcctaagagggttttacagtgttggcaaatataatcattattttagcgtgatgtagctgttctgctctggattttaaaaatactttattcttcttaacctataagggatgctttttttaaaaaaaaagcaataatatagtgttaaaacatttttggctttatttctggcaaggtctctcactcactctgtaactcgggttcctggaactcactctgtagtgctggctggcctctccttcatgacaatcctcctgctttggcctcccatgtactaagtctatgggtctctcttcacaaatctattatttctcttcctcttcctcctgcctgcagtagaagggtgatttttttttcttggttggaattttggggaaatatattgaaggtgtgaatgacagcttcttacagaaaccgactcacaggatccagacttgactcacgacaggttctttgtggacaccaacactgactgctcaagaagagagcttgcttcaactcctatcttcctcagtccttataggcaccccagcttgtcttgtggggttatgccaaccagtgtgtgtaggagagacatgaatagtgttcatgacaggcagggcgactcttaaatcagtgttttctgggcatggtggtgcatgtggaaccccagcactctgcaggcagaggcaggaggattgcaatgagttgaaggccatactgggctctagagtgagactgtctcagaacagcagcggcagcagtaacggggtggcggtggcagcaagacgacaggcctcaggcttccaggtctctctgatgacttcagtcccagtagtgagtcccaaaactctcatggcctcacctcctgccattgagagacaaaccaaagacatgtttgtccctggttttggagaatagttcattagagagacagagatagtttcttttaagggacccttccttaaaagaaagaacagaggaagtaatgcttatttttagctaagagcatccttgggctccttgggtggttttttaaaagatctactttcaataatgtgtgtgtgtggtgtgtgtgtgtgtgtgtgagtgtgtgtgcacgtgtgtgtgtgtgtgtgtgtgtgtgtgtgtgtgtacattagtgcagttttcctctgttgtggagattctcttgtcccaccaggtcccactgcttcagccccaaatgagtatacagagacactatattaattattaaactgttagctgatggctagggcttcttattggctagctctgtcttaattattaacccataactactaatctgtgtatttctacatggtcttggcttactaagagaatgcccagacctgttactcttttctggtctacatggagactgatctctggcgggctctccacttacctttcccagaattctcctcatctcctagccccgcctatcttcctgctaaatagatttttatggactttccccatcatccctccaatgccctggagccatgaactacctgacatgaatgggtgctgggaactgaatccaggtcctttgcaagagcagccttccctctccatcgctgagcccttgggttctgtaggtctaatagaggacagcggaggtacatccatggggaagtcagctctccctccctagtctcttctaagccttggcattacttttatgtactgcagccttacatgaaaaggtgttagagggagaaaacacaagatgagaagcagtgacagtctgtgctccaagaataaaagcatcaataaaatatcattgcaaaaatgaacaattgcaggcacagagtccatgaagttctcagcgcagtaacaccgggggcattctgttgctcactgggcaagatcatgggtgtgtgtgacttgcacagcctgctggggtcagcctccctcctttaagggcttctggagcctccagagcctcacacataacagtgaaggagcccatctcactgtaaactctttaacgctgtgttggttactttactctttgatgtgatgaaatactcaacaaaagcaactcaaggttgggaaagtctgttgtgactcactctgagggtgcaggcttggtggcagggaagatatggttcacaagtgtgagtgtgagggctctagtgacaagtgacatcacatctataggcaagaagcagagggagatgaatgccttttccttttgattaattctgagaccccaatccatgagatggttctgttcccaataaggaaggtcttccttccccagtcaaacttcctggaaacactctcatgggcacacctagaggtgtgttgccatggtgaccctaagtttaatcaaattgacatccaggaagcttctacctcttcacttggaatggtgcctgaaggagtagctcccgggcagcatggagaccggagagggaagacaagccttgtccttacacaaacaggaagatgcagaaaacataccttagtttggttcaaatatagcatcaaaggcacccaggagctcccatgcaaaggtaggattcagaagccattgtcagcgagcagccggggtgacggtgttgctcttacaatgactcaatgcagagaggaaaacagattcaagagagaaggaatgttccattctgagtttcccgtgccagtgcaagacagagacaagaaatccaagggaagcaacgagaggcttaggcaagcgagctcaggggcacagcggctactgtctaacagagaaagagaagccactgcagatggagagagggagggggagggggacaggaagggggaggggatagaccaacatcaggacccaggggcaagcccctaggttctaggagtcagatgtcacagcactggagaggatcctgtgagatttggaggggcgggacatatggaaaacactagggaatcgtggagcaggcacctggacatgcctggggtttatagacacaagagtgcatccctgcttgaggcctgtgaactgtgtctcaggtttcttccctgaaatatggggtaccacctcaggagcagggctagtgtcagcagctgcaggcaggagagcaagtatatttaccttttcaagtaatttccagttagcatagactataatggctttcctaggacattttatatgcatttattgttctactttgttcgtagcccccaccctcctctctacacgtccctgctgccccctctcacaggtcctcccacccgctaatagcccctcatctattttcatatgtgcacgtatgtgcacgcgtgtatatgtataatagatgtatgtatttgattctggattccctatgtgagagaaacatggtattttgtttttctcctcccccttccctatttgtacccctcgtctccttttcctcctcctccttgttttaaagtgtggaagacaggattttaaaaagtccatttatgaagacatatactgtcctttgcctgctgtctgtatagaacccagccatagagtccactttattttgtcaagtttaatgttctgagcacgagctgtattcccagctctgaggcttcagccttcagtccttagggtgtctgttatcttctctgggcactatattctcagcactagaacccccagcttttcccattgagcaaactcacgtttattacactgatttaatgtgtgtgtgtatgtttggggggtcatgttcacgacacagcacatgtgtgtaggagttggttctttccttctactgtgttcgtgcgtcccagggattaagctcaggttgtcagacttggctcaagagcttccacccactaagtcatctccctggctctaaatataaatgtgtacatacacacatacatatatacatacatgcatgcattcatacatgtataactggcttatgttatttatttgttgtgtgtgtgtgcatgtgcataccacagcatgcacgtagaagtcagaagacaactttcaggagtcaggtcaggtttccccttctacagagtgcatcccagggtttgaactcgtgtcttcagactagacagaaagttccctcacccactgagccagctctacggctctccagtcagcatgtgttaattgtgtacagcttgttgacttctgggatgaggggacctcatgatcactcacttcatgattataaaattgattaccgttactgggacctttgcagttttccctcggaaaatactgatctggcgtcaaattattttttttcacgtttttgcttcagatacatttgcatttagctgtcagccttctttacttgtatttttaaaaatgatgacagctctccttttccagggtagcatactccggaaaatcctcttgaaccgctacttcaaaggtgaccatggcgttggtgccaatggacctctgtcaggggcctatgccaagacagcacaagtgggaggtacgtgttcttccacccattttagggtctcacggcattatcttcatggcagtgctgctccgctatcttagttaaatgatccaagtgtaaaatattcacgtaaaacacgagtgaaatgtttgtgtagttggggttcatgaatccatccataggttgagcattatcgtggattttgtctttgattctgggtggtttcctcacaatttcttcatgcacgtattaaagacaaaatttgtagaatatttttatagagatttatttatttttatcttatacatatgtatgagtgcctgccatgtgtgtctgcacaccacatgtgtgcctggtgaccattggagtcccttgaattggaattacaaatggttgtgagccaccaagtggtgctggaatcaaacccaggtcccctgcaagagcaaccagtgctcttaaccaccgagccacctctgcagctctttctagagtacttaaaggaatgacagttggtgacattgaattgcatattggatgtttaagagttccatctttgtagattttttatatttgtaactaaactctcctgtggctcatgttgttatggtttaagaatttgaaaacactgtttgctgctaaaaacaatgtctgtgctgaagttcgagttgctgttctgtgtttctcttccccgaccacaggaggcttctctggacaggactcggacaagatggggatttccatgtctgacatccagtgtctgctggacaaagaaggagcatccgaacttgtcatcgatgtcatagtgaacaccaaaaatgacaggattttctccgaaggcattttgcttggcatcgccttgctggaaggaggaaacacacagacccaggtgctcgtctgttgctagtgctgttcgggttgtgatttctatatatttttaaagaatacttttgtttttgagaatttcatacaatgttcacatctcctgtttccactcctctctctaactcttcactatccactccgccccccaaccccccctaactttgtgtcttctccccctgccaaaccagtaaactttggatgacagtttgtgctgctcagataccctgtgtgccgagccgtcttctggagcttggttaacctatcaggagccaccccttaaagaaaactaactctcctgccccagcagccagatcacacccacagatcccagccagggttgagggcacacaaccttcccacccaatgctggaacactcactggcttggccgcgtgcggacagccacaaccgctgtgagctcatgggtgctgtggtcctgtttttgctctggtcctccctgacctccaactcctatagtctttcctgtttcttgatcactggttaaaggaaccagggaaacgtatccttttagcttccccttgctggctcaaacaaaatgaaagaactcacaaatcacatttcccttataaatttatgtgatttgctattgaaatgatagggcttcccccttgctctaatcagaacatcgtttgaagctcattctgcatcaggagccactccacagtggcagagggctctgtgtcacgcactctacggtggcagtgggcgctgtgtcacatgctctacagtggtggtaggtgctgtgtatgtgcgtaccaaggacatgacactgtccagctgcactcctgtcccttggcgacccctgccaggttctgcttggctcctttgcacccaacagtgtgctgcacgagcccgggctctggaaacttcccagggagcacttctgaacttcctggctcactgaccttcctatatcttcctaagccatgaagcaatgcatagccccagatggctagaaatccccaaacctattggccccaggagcggcaggcagaagcccagtcagattcaaaactggggtattttgctttaatttgttaccggtacatttaacaacaggagcttttctgtatgagagaccggtttgatagcagggctttggggacaaaggctgaagagacagcaaaaaaggcagcagtgtagcaccggtgtgaactggcttgaactggcatctctagcaacagtcacccagctgcactttctacatttccctgggctgcagagggtcatcccaggggaacgctcttcatcctcacatgggtgccgatggtgcgggctagctccaggagaactccaggctccacttattaaatgccagagcgttgctcccgagatccagtcttcagtcttcatttgccttatgtttctgtagtcctgatcactgggaaattgtttgttctgtaacctttactacctggaccctgcaactccccctggccgctgcccccagcttctcttccagcctcgtgtgactggcaccgtgccttctggttgtcacttttgactgactggtcaccctgtctccttgttggtcatcccttgatgacaaacctgggtgattctgcccttctgatatcgcttctatccctaactcttcaatccctgcttctcaagccatcgtcacaactccttaccgttcgctccacggggaccaagtttcccagcttcctttttgccttccctctaacgttcttttcgttgcctccagtgacattttttaataacactatgttatacccctgcttcagatctctcttcccaggaaagtcagactccctgctgaactcatgggattcttcctgatgcaggtccctcatatgctcaggctatctgtcattctgtctgtcccgtcagtgcttctctcagaatcgctttcaggcccttgtctcactgggcagagctgactgccagttactgcatgaccttgctgtgacttcctggtgctttgggtagtgtttctatcatgtcacagcacctctccaggtgtccccagattccattcctgaaggtttggaacacatcttcattgctttgctgtttgtgtttggagcgctaatgcccagtaactattcagtggtggatatgctgatgagaaattggttgtgatgaagccttctcttctagctgggcaagtggcagctgctccctggcgagcctcactgcacttgtttctcacttggagccctctctgtgttcctttattttattgtctgtcttacattatgtctctccagttaattttctaatatttgtagagggttatagcctactttttattttcatagtcttttatagctgttcaatacatatcacctccctaaaccatacaccacacacacacacacacacacaaacacacacgaacatacacacacacacgtacagacacatacacacacatgaacacacacatacacacacacacacacacaccaccaccaccaccaccacacacacacacacacacacaccaacaccaccacaaccagacacacccacacacacacacacacacacacacacacacactggctggtgatacaaatctgtaatcccaactgctcaggaggctgagtccagaggaccacaagttcaagggaaacctgagctaaggagcaagctcaaggctggtctggtgaacttagtgaaagcaggtcttaagcttaaaagtaaaaggagagctgggcctgtagctcagtagtaagcatgtgtgtagcatttccgaggccatggcttcaatctaaagaaaaagaaaacaaaagtcacacagaactgttgaagaaacaccattaattcaagtctgtgcatgaaaatccccttgttgcttaaggaaacctgactctgtaggttctgctgcttaggtctctgatttagggacctcatgatgtcatcagaatgtccctagatgtcagctgtatgccgtggctttaagaggtctagatcagacctgctgaatctacctctcccctttagtgactcagatgtgtccccactatgttagttactatttgttgctgggataaagcaccacgacaaagcagctcatagaaggaaaaacttgctttgcttatggctcccaagggtcagttcacaataattagagaggcctggcagcaggtggctggagcaggagggggagaggtcacatctccgtccacacaaaggaagcagagagaggaacctggcagtgtggtggggctggagaccctcaaagtccctcgacctcattgacatactctctctagaaaggcttcaaattctaaaagttccataaccttaccaacagtgtcgctggctggggaccacgcgtgcaaacgcacacgctcatggggcattctcattctcaccactcactcccccagacttctccagttccacagggattttacatttttttttaaaaaagattcatgtgtatgttgagtgcccgaatgtatgtaagtgcaccacgtatgtgcagtgcctgtggaggccagaagaggaacttggatcccatgaagctggagttacagatggttgcgagattccatgtgcgtgctgacaactgaactcggggtcctctataagagcaacaaatgctcctaaccactgagccatccctccagccccgaatttaatattcttaatttcctttagtcactagtgtttcacttaacagtttgtggactgtctgagctgcccagcccccccccccccaggtattctagaccagagagaatccctggtccctttctacacaagtcacttcctgcgcccaatatgctccatcagatgcggggtggtggaggcagatagaagaaattacaacttcagacactaataataagagaaataaaagctaggcattatgggtcactccatacccagaggatgagccagaaggatcacttgaggctgccctgggctgttgagtaaggccttgttagaaatagaaataaaatataatatacaggctattgagtattacataacatgtggcaaatccctctgcttcacagcatctcatttttttaatcaataccatgtgcccggaatgagaagaccgtactcatcacaggggctgacagtgtcctcgagagggtgggtgtgagtggggccctgacagctttgtcctcacagagctgtggcattgccatgactttgcgactttcctactaacgttttacaccctcccttcccccttccagccagactgcgttacaaagattagagctcaagcatcagcttaattcgtgggaccataaaggtctgtggatgctgcatttatcctgcaagccatcagaaccagcttgactgtctcagtgtcgttgccatggttacagtggggctttctttttcttttcttttcttttttcttttttcttttttttttggcctgctcctgtagagttgctagctctctgcttaggagcatcccctaacagacatgaagctgatgcttgaaggctgtgtaaaactcactgtgtgtagatgctgcacgtgtaacctagactttagagttctgtctagggtagggcctggctccgctccggccattcctgtaggaaaacatgtgcacagctgtcagaccccaccaacctgcctctttagattttatttgggggtgtggctggttccacttgctcaggggtgtctcctctggactgcatcccctcctccatctcctgtcaagtcttacgaatccttccataaagttaccaagcacacggtgacgagtaaccgcagctcagtatttccctctccgggaaggtacctcttgccacgcttttggtcttaaatcctccctgaatcattaatgataaactggagtttgttttcagtcaattttccctaaactacacgtagagcatcattgcttaagaagtagctaagcaacttaaaacctatttaccagtgggtgcccgtgagtgaagttgttatggtaacgcatcctaaattaaatgtactatcaagaaaaataactttgtcacctaacagggagcccttatttgtccggggtagtcataagtgagtgatcatgtttcactttggattacaaactcatgtgggtaggagtcttgccatttttttctttttgttttgtctgtagcaaaaatataggaccctacacatagtaggctttcaataaatgtgtgttgaatcaatgcacagctttagatgacaacttactagactcataattaaaacatacattcaggaggatatatcaaatagaatataaaaggttagaatttagtgggaggtgctaagtaaaactggctgttattaatataatgacatgtgctattagtgtgtattaagtggaatgagacactgacagcctgtccatttgtagaataaataaaaggtagcacactgtgctttttatctgtcaggcacgtgtttatttcagagtaaaccactatttctcttgcctcagggattgatactttaaactatgctttctctgcagtattctttctaccagcagttgcatgaacaaaagaagtcagaaaaattcttcaaagtcctttatgaccggatgaaggccgctcagaaagagatcagatccacggtgactgtcaacaccatagacttagggagcaagaagagagacgatgacaatgacctcgtggcctcaggccctcggatgagaggtgaggagcttcctgaatacctgggagaagaaagcaaggaagcatttaaatctcatgtagctttgtcatcttgcttctggggtttaattattcccagtgtttccagtgtggacttccagcggtaaaggattttggttaagggcttgaccctagactagctctgcaggaccaaactaaaatggagtttaattggtgtggaagcaatgggcaacatgaaagacgtttgatttccttgttctgttcagtaagaaaaccatcccaaactttctgggaatggaaattaaactctgaggacagaaagtgtttgcgtttgatataaccagatgattgccagctaaatacaatttgtggaggtgttaatattttgcaaatgatcattctctcctatgagatctataggaattcttaggtgtgtgcacacacatgtgtttctttatacattcttgttctttctgtgtgtgccacatgtgtgtatgggtgtccacagagaccagaagagggtgtgggatcctagaaactggatctatagaaggctaggagcagcctgacatgggtgctgggaactgaacccagtcctctggtcgagcagcaagggctcttacctgctaagctatctgtccttttttttgttgttgttgttttgtttttgttttttgttttaacttgacacatagctagacataactgggaagaggggatactttccttccttccttccttccttccttccttccttccttccttcctttggaggggggggtttcaagacagggtttctctgtgtagctttggagctatcatgacactcgctctagagaccaggctggcgttggactcacagagatccgcctgcctctgcctcacgagtgctgggattaaaggcatgtgccaccaatgccctgcagaagagggaatcttaattgaggaaatgcctccataagaatgacctgtaggggagtctgtggggcattttctggattaatggttgatgttggagggatcagcccactgtggatagtgccttcctgggttctgggttctataataaagcaggctgagcaaaccagtaagcactccatgacctctgcttcagttcctgtgtgtgtgtgtgtgtgtgtgtgtgtgtgaaatcttgtgatatatctatcacaatatgaaataaaccctttcctccccagcttgcttttggtcagggtgtttaagcacagccatagaaaagcaactaacacaccacctgtccagccctttggttatgtccttgtgaagtcatctgtatgtgtttttacacattcttatgtgtctttgtgatatagatttatgagtcagaaaattctaaaattgattaaatataaagagcttttcttcagattgctgtattaactttttagctgttgtgtcccccccaggaaaccgttaaacatcttgttagataattttaaaattcagctgtgggaaaatttggattcttattgtggggtagttaaaaaaaattagttcaaaatccagctacttcttgcttttcagtgagagatccatcacttcacctgaaagagggaatgaagggacagctaacagaggcctcctcagccacctccaaagcctactgtgtgtacagacgagagatggacccagagatagacatgatgtgcccaggcccagaagcggggagtgcagaggaaaagtctgccgaggaaattaccatgagcccagccatcaccgtcatgcagcccatcctcaggttcctgcagttactgtgtgagaatcacaaccgggagctacaggtgagtcctcttctctctgtgggtgagctctgtagcctgtgactgtgagtcatccaagggaatttaggagaggattctggagaaataatcaacaaagacaccagtgccctgttgaaatggtaaggaagaaaaaataagagtcaaaatgtttaggcattaaaaaacaagcaaatgtacacatcctatagcaccactgagccccttccctctcctctgcagtgtttgttcaggacggccatctttgtctgcagttcatggttttagactcgggtgtttacattgttcccaatccgtagttgttggcacaatattgaatatattttacgtttcattagaaacaaagtcatataaagcattactatgatagtgaaaattgctttgctaattaatgcagcccacatccataacatctccacccaccactgccatttcctctgtcagacggggtgggtggacgagggctgctccaggctttgactacctccctggcgttatgtgtatgcatgacgttgcccatggtgccatagcagaggcacacgaaaggagctatcttgactggcctgactgagggagattgagaatgctcacctgaagagcttccatttggcagactgcttccaagaaagacacagggccaccacgccagcccgctttgccatgctgcaagctagtgtagctggcaaatgatctttattaatgaattgcagagaactggctgagatttctgcagtaggttccgcctaggatctcctaccttgtaatgtcactaagcaatctggttctcagagcatctgtccacacagagagaggcagagtgaggagatgtgttcactgttgtctagaacgcagaggatccgaaaggcaagacaaagtgctgtccgtggcgatgagatgctctggaatgcatgaggagcgagcgtggctcatgtggaccagcctgccaccgcttaggtcaagcttctgcagtgtgtgctgcctgcttgctcagtgcaacctacgggccctgccaatgtgggtcacagacggcagagcagatgatgtcatatctgactgtgccactcacagaagctggttcagataatgtataaggctactttgatactaagaacaaatagttaaagcaaattcaaatagatatctgtaagtacattaaaatacaagatcccctctcttccccattctttctcttctttagcgtattccccaaagtgcactaataacactgttttcttccagaaaatcctatgtacaaacggtgatctttgcatgtaaacctaagtagtctcgactgtttaatttagtaacttcatgtactgccacactgcttatttcttggtggtgcccatccatacatatggaagtgcttcctaagatcccaaaaccatcacgctgccagggataaggccatggcgcctaacagacagtgagcagtgaggatcttttgtgtatatctacacagatttaggatcatccacacaagtgggactcttccctgagaagcctagtagggcttcatgtttcccataccacggcctgacggaccctgcacagcgaagacacggttgtcagggacggttcgtttggaagttagaccccctcccccagattttgttctccttttcctttctacttttcacactcccttccaccctctgtaggcttaaaatgatggcagtggagcagcgtttactatgacctgttctgaaggtgcttacactacaacctgagggcctctcttaagagaaacttaacttagcgtatcgatatttaaatattacttagttttcaaattagcttggaaaataatgagtctgtttttcaaattttatttatttattttacatcccaactgtggattcccctgcttcctcttctcccagtcccctccccccaacctccgctctgcctcctcccctctgaaaaacaaggagttttattatgacagtctcatccctatcgtttgcttagacatagtcacaccagtatgtcccctgattgctccccttttgtgttggtccccccactttccccaaggtgttccaatttcttgtgaagaccaattgaattccatactggcaagaatctttttgagtaacacacacacacacacacacacacacacacacacacacacacacacagagagagagagagagagagagagagagagagagagagagcatggccagcacccctttttctgtgttttgctttccgtctctcagttgcactttctttcatccccccccagaacttcttgaggaatcagaacaacaaaacaaactacaatcttgtgtgtgagacgctgcagtttctggactgcatttgtggaagcaccacaggcggcctgggcctgctggggctctacatcaatgagaagaatgtagcgttggtgaaccagaccctggagagcttgacggagtactgccagggcccgtgccatgaaaaccaggtaaccatgactgcagagcttcatgagacgtgagtcacggtgtgccaggctaggcatagagccagcgttgtgtaccttcgaagccttcctgctcactctgccaggcattgccacttctcttacaaaacatacaaaggtggaattgtagactagcaaatgttaggccacattttaaatttcatcatgaaagaagattcccgtgaaaatatttaagatgaaagacttatcaaaagaagggcaagattgtatttcctcccagtgttcagtttctctctgtagggaatctctccagatgtgtggaattaactcactgtggctttggctctactgcagtgtgggaggaatctaatacccatgttacacactcattgagctagtcaaatacccgtgtcacacaccaggtgagctagtctaatactcatgctacacgctcattgagctagactaataccagtgttacacactcaatgaactagtctaatacccatgttagacactcattgagctagactaatacccgtgttacacactcaatgaactagtctaatacccatgttacacacttggtgagctagtctaatacctgtgttacacaccaggtaagctagtctaatacccatgttacacgcttggcgagcatatcaagtgggtctcgctactgtccttcagtcagtggcttctgacccagagctcacctgactttgcagtgtctcagagtgctgccttcagcgagctgcagaaaaaaaagctgcagagtactttctgagcccctttgatgctatatatgcatgtgtgagagacccaatgttcacctccagctcccagagtaccttgctccacttgaaggacacgttatgggagaagacagaacatataagggaataaaggggatgatgtcattttgacagctttttagcatctatgaagcatcttggagcctccaacacaggcaaggtttagggcggagtctccatgtcaatcatttctagacataaactttaaagttgcgattgacactaaacatcagtggttggtgtagaaaggaaaagttcagcttttctattgtagattatatgactttcctcacacatactatgtctgtgtgtacacatatgtctgaacacacacacaatatgtatacatccatgggttcatatggtggaaacacgtcgatcatgtaaggttattacttccttctctgtaatgtgtttatgacactaaaaggattttcagatctttccccctaattttcaagattatattttagtttcctacaacaatgacaaagacatccttggctgctgattcaaagtcaatgcacagtacagaaattcagagtttggtcttgttgataaaattctctctattgtagaaaatgttacacacacacacacacacacacacacacacacacacacccacactagtttcccattttgtgaaaagtctgactgagcattccttactttgtggttaacaatgaaattaggttttgaaattccttaatgaaaccaagtaagttctcagtaaaaatgtataataaaataacaagtcctacctggataatcccccatgctctgaaaatgtgtggaaggtccatttggctggtgttcccatgagcagaagcctcaggacataatgtcagtgttggatgggaatagctttcctctgcacaaatgcccaggccaagctgtcctattggctggggctgtcctttcttgtgtgacgcactggggtgtcagtttctcaagctgctcatgtggcttagaagtcctcatgctgcttccatagaacgaagcttgaaatcctcacacagtggcttttcaccctcagagcacacacagcactctctgcgcgggtgtttttctactttgttcaaccacattccctccacaaatatgcaagtccaaggaccctgtgaactttcccaccacccaggacacgaagtcacatctgctccgagttttgtgaaattcatctacaatcccatttttcttgtcctcttatatttattgcaccttaaaattcacagttccagaatctcattttgcattagtgactgggggagttttaagttacccagtcctctttggaattctgcagttctttgtgtcaaagataagtgtctttcgcaatgtgttagtattttgtgcccagtaccagtcaattgatagaccccactcccccccaaaaaaactaatcaaaatgtccaacattgtctgtacctggtatttgaaagtttcaagtcttctgtgaccacgtctagtgctgtgtcaaaatagcatgccgttttacagatatctccttttctagacctgtatcgccactcacgagtcaaatggcattgacatcatcatcgccttgattctgaatgacatcaaccctcttggcaaatacagaatggacctggtgctacagctgaaggtagtgtgaccccaacattttccgtgtgcctctcctgcttggagtggattttaaatcttcaagtgattgtgcaaaacaccgtctcacccagactcttcaagtgatgattgtgcaaaacccttttcaacccaggaactgacaggagaggacagtgagcccaccaggcgctcactgagccagggaaagcatgattcacctgcaggccatagtcattgtgaggttctgtggtagagatgttgaggctgcccctcacctcttctcccctgttttaacttcctgtttttcattacaaacagaagtgaaaggtgttggagatgcactgtgacatgggctttctaatcttccctggcttgagaattccatctagtggtcacaattcactaacataaaggaatgttgcattttagtttaaggtctttcttccttcttactgtgttatattaggatctagctgcctcccaatgacagtgttagtcttgagcctggtgtatgcttccagaaaatcctacctatcaaaatttaggcatataagggcaatcaaatattttttgttcaaacgaaaagagataaatagatgaaaaccacaacaacgtacataaatcttacatgctaagaaataatactcaagttagataagttacttgaggccacattattgtgttgagtgtttacgatggtgtaaagcaaatgcagggactaaggaaatagcttggtaagcacagcactcaagtttgctcccccagaaaccatctggaaaagccaagtgtggggataggccttctaagcctagcgctgaagaggagcacctctggcctgacaacatagcccctaatcagtgagctgccggccattgagagaccctacctcacacggcaaggtagagggcatacttaagatatgactgaggctgtcctctggccttcacatgcacagcacatgcaaacaaaactcttcacatagttaaacataacttttttttttgtaaagttaagcctatccaacttgatagaaaattaggttgaactttgtgcaggtgagtggccgaggagaatctaaaatgctatttgtatgtgctgggttatatccaactccacttctgggaatagtgtgctgggttctatttgtgtttttaccgcttttatccattattgatgtttacaaagtggagtcagagacaggttgataaatggtagtttattgggggaaaaacactcacgaaagggagccagtgaccaggtttgcacctgagcaagatggatccagaaatgcttcccagtcagctcagccaggcgaaagagagccgcgtgcgagcctccctccttcttaaacccttgttgggcatggtcagcagtaactcttaatcagggtttctccctacaatccatactgtgtataagatctaaccccccccccccctcccctctctctctctcacacacacacacacacacacacacacacacacacacacacacacacacacacaccccgctgcccttcttgtgcctttgcttcggtttgtgagcatctagtgtgtgtgacaggcaacccaactggaagcactaaaaagagtttgtcattctctcttaaattcaactttagccataattcctgaagactcaacatccagaggcctcctcctttgcctctaaagttctttgtttgtttaaaggctgtattttaaaatctggcttgtcaatcacagggctctgtaagggagatggtgaatgactcataaacttaacacagcttatgggcatgcaggttacttataaaggcagatcttactttgaaaaattaaataatgatttaatgaatcaaaatactaggtgttctagttaaattactttaaagtggatcatttaatttttatttatttcagtagcacaatttattcaagcatacagcagtcagctacattaggctgcacctaaagcaacacatgtgtttgtttctcttgaaatactttaaatatggttttatacttaaggactaagatgagtgtactttttaaatctaaagattttgttttattattattgcctggtaagagaacacctgtaaggcagaattatatatgttggctagtttaggaaagttcatgagatgaggcactataaataattatttagtaacattgactcctggatctgatggcttaattatccataattttagtaatataccttcaataaaagataacgctatgaatatataccatatgacataatataatttaaatataatatcatacaaattacagttttaaatatgctttatatattcatttaatgtatggcttaatgaatttctcagatgcctgtctcgtccttcactttgtattttgttttcgtaactggtctgtgaatgcaaagtgctgcatttgctaagaggtgatgtctgtgttttgcttagaaacactccagcttccattggaaggaaaatcccgctaacaggagtatgtctgttgggtttttcagtatatccaggctcatgtacttccagatcggttcagatttcaggatgttatttgcaagatttctttctaatctcaccaagtacgaaatttgattgaaagcaccacactgccaatggtgttggggaactggatacattttaaagtcctttctcactggccctgcagagagtggctcatctgagaacaggccccaagatgctgaggtataacctcggaattctgacagctctgctcatgtgggactaaggacccgtcatccgctctaatccctaaaccatatttttttaaacatttgttttttggaacctagattataaaagtggattgtaggatttgaaaatatttgtaaaatacaaatatgggacagaaaaaaaaagtagaatccctctcgctgcactgaaatcctttgtggtggctgtggcattggtgtgacccgacgtcacccttattatcctcagaatcattagatatccctttaaaggtggcatctggaagttctgggagcattggacagaatgtaggaccaagtttaacaagagttaatttacacgatcttatcaattagtgctttatcctcctacaccaaacatggattcagctcaattatttcattctaaaaccatgagaactccgagtctcttagacatgtctttaacaccccacacataacacacacacacacacacacacacacacacacacacatacacacacacacactcgtacacacacatacatgcacacacatgcacacaacatacatacacacacatgtacacacatacatacacacatgtacacacatacacacacatacatacacacatgtacaacatacatacacactcacacacacatacacacacatacataaacatacactcacacacacatacacacatacatacacacatgtacacacacacatgcatacacatacatacatacagacacacagacacatcagacagagtaaggttttatctcaatgaggacagagcacttccagtggtgactctctggtacccgttcagcattgaaaattgcctcttactttgatatcttaagcaacagtgtttgaggtagtgtgtttaaaaacaaaattgtaacagctgaaacatacactgctttaattctatattaagagaatagtagacaatgtcactcagcatgtggtgaggtaaacgagctatcaggaaatgacctttatatttctaactcaggaacttacaacttttctcactggtggttcacaaatttatgtaaaatttcaatattagagtaacattattacttcatttaaaaagtggttgtactgaattctttatatgtataccatgtccataaaatatcactgattcctgtttctctgttgtgttaaagtgtcatcatagaaatccaatttaaaaaacattggaagaaaatatatttctatttaatgtagtatctagtcagtcttccatttaaaacacctgtaattttaaaatatccccccttgggagggcagtggtggcgcacacctttaatcccagcacttgggaggcagaggcaggtggatctgtgagtagaggccagcctggtctacagagtgaattccaggacagccaggactgttacacagggaaaccctgtctcagaaaaaaaaatccttataaaataacccccattttcatgacttgttgcttttattttgtattgataatgaataaaatattctattgtccgttagttagacaaaataaataagaagtttcaaatttcacctggttgagaaaacacaaagggtgccagtgagctaagttaacacagatgccagggattgttaatctgtggtgtggactttgcgcatgtactgaccctgtccttgtccccagaacaacgcctccaagcttttgctggctattatggagagcagacatgacagcgagaacgcagagaggattctcttcaacatgagacctagggagctggtaagaacacttgcccaggctgtctgttaggggcagcatctctcgctgctccagcagggctgtcaggagcaccatggcctaaattcagggagggtggtgaaggaccatgtgactcaggcttgtggactcaccaggttttattttagaattagttttctctttttatttatgtgtatgtgtgtccatgcatatgtatgtcacatgtgttctggtgcccttagaggctctaaaagtgtgtcagaacacctggagccaaagttacaggctgttgtacatgcctggacatgggtactgggaatggacttgggttcctctgcaagagcaggaagcacacttaaccctgagccattgctccagcctgattttgccagttttatcgactttaagcacttctctttgctaaatttccacacactacttaactatatacaaatgccttttgcaaaaaaagaaaagttatcttggcttaatgatttctgggtatagttgtctgtagtagtgggctcagccctatagagtcacaattgtggactggaagagtttttaaaaagcacactgcaccgacacttatggactcttaccctgttttctcccatcggtgcaatgattcacatgtttgcatcatgttgcatgtcataagccacctggagatgatttttgagtatgcaggagggtgcaaataggtgcgtggttttcatgcaagttgctccagtttatagtgttacttgagtatccccaggtcttggaatcctcaggaggtactgaagccgggtccccagaacacccaggaatgatggtttgtaaggaaggtctgaagactgtgtttaccacacccccgagttttgtttgtacatttccaaaaacacagataaattcgtttgcgtgttttgtgtatcattctcatgaatgaactgtcacagaacatctggcctcagagaaagagggagacacaatcaggactccacaagcacaagttaaaagctccatttcttttgccttctggcacacaaacaatgatgtcatccgggcatgcttcaaaagcaatgggttccagatacccgagagagcaggctcaagacatactgctcagtgtgcccgccctcccgccagtgacaaagtcctgtcatgtcagtgatgctgctggtgctgtggagactgcaagggaggctggtgccacactctctgggctcactggtgaagagtagagtggagatggagagagaagacattctttagttagagcctcgtctctccaggcagtagagtaagactaggaattgcactctggttaaggggcatatggctatgaatttatttgacagagcactgtgcactcactttgaaaagagtcccctctgccattttaacccttttctgtcatctccatgatccaccctcaagctgagttaggtgcctgccggagacctgtcatacaacagtgcacgcccttgggcagaggcactctccttgtccacgcaggttcttcagtgcccagcactggtgccagcaccctgtccccagctccctcttgagtgctcagtaaacagtggatatttctcagggttccagactctcttaaatcgtggagacttcagcgtgctagtgttcacagacagaagcagaagtgttggctataaacagggaacattgccacagtgtgattccatgttcacttaaatacgccgtaaacagggaacacagtgattccatgttcacttaaatagctgtggttttcaaaaaatattttaaaaattattttctgttggtagatattattagttcttattatggcgctttggcacaaataagttgagctagttggatttctcccactgtgataaagcagcatgaccaaaggcaacttggggaggaaagggcttatttggcttgcactgctggctaatgccctggctcacattcatttacacagcctcgggcagacctgcttagggatgttaccagccacagtgggccggggcctcccacatcaattccaatgaagaaaatgctctgtaggccaatcttagggaggcacattcccgattgaaactccctcaggtagctctgggctgtgtccagtcgacagtggaagccactacacttctttctttttggtccccgtcacgtggtctatcccgtctccccttcgccggttccccctttcaccctatatacctgccgattttatttcatgcgtactccattgccctgtctcagcactctcccttcccttctgtctctttctgtcttctcacagtgccctctacattcacacccgacagactggcacatgcacacagttcagtctagagtctgcagagaagagaaaaatgcagtatttgcttatttagagctgctttatttttggctgtcatgaagcttcccagttttaagttatagctcacaaacaatatgaagtgttgctgccaccttccagaccctttctcaagatttacttatttattatttattgctaggtggatgtgatgaagaacgcctataaccaaggactggagtgtgaccacggggacgaggaaggaggggatgacggggtttctcccaaggacgttggacacaacatctacattctggcccaccaggtaccacattcttatcagcaagtatcttgcttacctggtcatggtgtctcatgcagatgccttattattgtatttctaccttctggtgtccttatttattcagcacccaccctccttgctttcagtcagagaaaacagtaagttggcagaatgccccattgtgcaattcagggtccgctagggagccattgacaagaagaagaggcttgggagaaaacttctgtgcctggaagaagtaagcctctcacaccagagcctcgagagagggaagacaggcttctgaggaggcagggtgtgaagaggtgggttagcggtattctataacttagccagggctagcccagagagagctctgcgttcagtcatattgacaaacttttaatagaagtcattaggcttgcacctctcagtcctccccactggactcccggaatttataagttaagtcctaaatttcttcagagtggtgtttccgtttcattgctggtaagtattgataagcattgcttggtaagcccaattccacaaacatggttgattttgaacttgcatcatctaacacagacaggtttaaaatgtaaaattctaaatgtgcacacagtgacttgatttttgttgccaatggctccatcattttgagaggataaagttcaggctttgaaaatgtctcaagcctctcctgtctgttttcctacccatcttatctgttgatgaaatagatactgattgatggaggtcagattgtgaaggttgctctttggacatttcctgtgccctccaccttcagatgttcacctaatggacataaacttgaataatgttttttacatcttcaaggaaggaatccaggtctaagagccccaccacaggactgttgctcttttgtgatatagtcaatacctagacatatgcaagattttcatagtctgtccattcacagcgtgagggcagccgagttacagctgtggagacagaaaggcattttaggccttgaggaaccaaaagccaagccaagagacaagtagaaggaagtgagaaggcggagattcaggatgtgggaaagtcccatttcagagaaagaaaagtcaggcgacagagctgattcaagctaggggaaaaaaaagaagagtagaaaatgaacttgaatgtgaacagaaagaaataacccttaggctgagaattaaaattgcaagccatgccacaggaacacagtgacacagttagtgtgtctggggcagagggttgcctcggagtctgtaacaccttggtgcggggaggcagtgaaggttggggcagagcgagcagcattggtgttttctaagaggagtcgagcccacctgcacactcttcactggaagctggtcttcccctctcggcgaaggctgtccctcagcatgggcgagcagctgcatgcttcaggcctggccttgtacatacgccacgggacatgaaccccacagtcaggctaaaccaacacaattgcaggcgttggatccaaatcaacccccgtacccttgaagtctcgagacaccagcaggagagtggacagccaaacgttgaagtcaagactcacgtttagctcagcaccgttttagtaggttgagcataggagtagaaaatgcagatgctagaggtggccgtggagtgaaggaaggagaacacacagctagagcagaagcagagaaggcagactgagggcaggggaatgaagaccctgtgaggggcactgagtgtggtgcatttgagctgagaacaaatacgttcttagagagaaacaatgtgttcaaagacgaaagagcaggaattcaagccacccaggggtcaccaggggtcaaaaacaacttgctgagaggaagggggagagcagcagattcggaaatggctggggtcccgtagacggctcttaccaaacttcctccagacaagactttggaaaagcagaacagcagaacagcaaggatatgctgtgtagctgcaaaagggaagctaggcttccagagtgaaggaccaggctcagaaagggagcaagtgggctctggactgctggactcattggccttgtgatttatccaaacaggtccctcttagaatcagagatgctgtaggagcagactcgagactcacagaggcacagacatacagaacccttcagtggttctgctggtgtgtgtaactcgtcttgttcccttcagtgatacaaggtgtcattccctcgtcagcatgtgtggtttccttccggaattaattataccactcgttttccttgagatgttagcaattttcacccacattggtctcttttgactcttccatgtgtgggtcctatggctagctttcggctggagtgttatttggtttctcggccagctgtgttccttgtgaacctactgtgcaaacagcccctgcacagaggtacacatgaaatgcgtacaagatggccagctgttccctggaggggaccagtagctgtgcagtacggtgccagatccaggtctgaggtcacctgcggtgggagtgaggcactcaggcagctgatgaccttgcagattctgagtctgcccctgcacagcccagtcattcaagaaccgagctgcagctccctcctcctgactttactacaatcgtcctctgcgcagacagtttattttggtgcccgcagactttcagtttttgttgttagtgcttctcgtggcagggacaaggttctgcttttccaccgtgacatccctctgggcccttcctgtggtcagggttacaagaagccaacagtgcttcttgtaattgtcttgtctaatctacataaaactattaatacatcacgaagggaaatttcttcagctctgatttctgcggtgttgtgctgtgaatttccttgccactcagcagtgcttcctggctctgccctccccatctccaggtcgcctctgctccccatcccttctctgtcagggcttctcttgaagcagtcaccacccaccgtctggtacatttcccacccctccgtagaagctcgtcacgtgtgaagctacatcacctctttagctctatcaaacaattcatcttcttgtcgtctgagtctcttcttttgactctcacctgaagtcaaatgtttatggaaagggcagggcatctcggctcgtgcctttataatccctaatctcaggaggctgaggcaggaggactgctgtgagttccaggccagcctaggtgcttgcatgagacccccgtctgaaaacacaaaataacagaaagagatacaagaaataaatggataaatgttagaggctttgtgggcaagaagatgctttaaatagtaaatcaatggaaagtaacaacagtcactttaattcgttacatgaaaatcttctcaaaatgcaagctttaaactttttttcatgagcattttcctgaatcaatacatggcctttgaacatgtcattttaatgactgcataattagacatcatttgaatgttctgtaatttacttaatcactccatattgttaagtaattaggtttctaatatatttgatattacaaattatgctgtgattaacaccctcatacattaatctttgtccaccatgctgatggttttcctagggtaattttcaagaagtttaattactgggtcataggaactactctatacctcttgatatacattgcaaaattactttccacagtgcgtgatggttcttatgctgttgaaccctaaacttcatgtcattgcaagaaaattctttcctgaactgatagcgtctggaatatatctctcagtccacagactcctgttgactatgtctgtgtgtgagatgcaaatggagatctcatttgtagtcacttccttagagtgattgccaccttcctaacactgcaacactttgatacagttcctcttgttgtggtggcccccaatgatgaaactattttcattgctacttcataactgtaatttttgctacagttatgaattataatgtaaatatctggattttttgatgatcttggatgacctctgttaaagggtcatttgactccctgtacattctttggtcctttgatcatttgtatttctcctgtggattacttgaaggtgtatttatcttttatcagttctcctttgccttacagaattttaattgaggatcataaccattcatccatcatattgattgtatctattttccaattcattgacctttcagtgttttaatatcccctttgtccataaccttaaatcttttagacacttccctggggtttctttgagcacataatgagttcaacttttgtatttaatcatgtagttttctatcatcatacatggatgtttggggcttgtagcagtcttcctgcctcaagtttccagttgctctgatcgtgtgtgtgtgtgtgtgtgtgtgtgtgtgtgtgtgtgtgtgtgagcacctgcacgcacacgtgtgtgcatgtatgtgtgcatgtgtgtataccaccatgcccagctgaggtggtaggttctggttctaactcttctcagaaggcacattctgagttttgatcagggtctgtggtagccctgtgcaggaatgtagagaatggaagcttttggagaagctatgaaggccagagtctagatgaacctgagactcatgtgtgtgagtgacctggatcagggcaggcctgggctgtctgaccctcctctcgggagaaagaagctggtatgcacctccatcgggtcccagccccggtcggtgttctactccttccagcacttcaaaagaagcctgaagtttgaatttttctaaaatcatgaaatctaatctttaaaagttggcaacttatttaaaaaatgtaaagtcacggagcaggccaacctagctggaattaggttaccacgggtagaacctaggatacacattcctgcttgagttgtgtagatggagtgaagctgtctggcttccaggcaccttgacactctcacaatgcagtaacagcgacaggtgagcattgggacaatttgcacgctgactaggaacagtggaggagagacaaacacggggcaattagcagaccatggtagcagccatgcactgatgggaatagggtgtggtaaagctggagatgagaccatctggagggctttctctgaggatttgaaactggagtggagtctaagggaaaaaacacaagtacatgaaatagagggtgacttacaaggcaccattcagtggcttctgaatggcaagagctcagtgtgtctacagggagaaaataagacctggctagctggtctaccccatctagctactgacacttgagtattggtcccattcagttcattttgggttcgtttatcacaaagtagtgattattggtctcttcctaagtcaggcatcatgctagttgctgagatgaaaaggtaaatcaagaaactcccaagaaagcaaattctggaaggagagggggatgggaaacttccatgattaaagatgctgtgttgaaatggaaaaagtgcaggttgtttgcacttggcagtcaggagcgagggaagaggatggttgaggcagagagatctgcttcagtgagaaggcagcatagagtctagagaggggcattgtgctcaggactctgcacagggtctccatcctgtccacttagacctttatgtgacaaagactacagtaattggaaccacgtggacatcgctgaaatggaataaccagccataggcacttaaggaaggtcatgcacatgagagaagggttggagagtgaagaagtgactaggaaatgaaatgctctcgggcttgggacttggtagtttatgtgtaataattaaaatccaaatatagacgctttttctattatcattgttactgtgataattcctgtcatcagagtgcagcactaataccctctgacgctgacaagacaccctttctcttttctttcttattcccacatcagtatggctccttgcagcagtggatactcacagagagttctgaggaataactcgtcacagcaggcacatgtgttcacggtgtttttatggaacgtaagaactaagaataggcattgggcagtcagggatctcacttacccagtactgatggcttattttcattttatagaccactcttggccagtcttttcacatagctcagtgtagacagggcttggcactgtcttccctcttgctgagcagttttcttacttgtgccaatgataccacccttctcttgagccaatagttgtcatctcctgccattgcctcccctacctcctgcataaattgtacacaattgtcttttttttttctgtttttgcattgttgtattcctcatgttcacccaaaccacatttttacatttgtggtagatagtgatttgatgtgaagggttttgcacaggcttgtgtgtttgaagacttcatctccaggtagtgctactgtttgtaggaggttgtagaacctgtgggaagtgaggtctagctagagcaagtgcatctcttagagagtggactctggaattttataaccttccatacttgctgtcctgtctctgtttcttgatccatccagaagtgagcaagcagccttgtggtcctgctgctataactgcagctactccagccaccatgccttccccactgtgtggactgtacgctcaaaccatgcagcaaaataaatccttccttcagttgttacctatcaagtatttgattggccacaacactgaagcagagtagttaataaatgctgtgcacactagtagaattacttccggttattttctgcgtattaaattgtttacgcttgcctggttgtttgttcgtgtgcaattattcatgcatagtcaattgtttgtgctcattggcttctgcacacttgattcttcctgcatctttaattgcatctttaattaattgcttatacatattcagctgcgcacgttcaattgtttgtgtacatttaactgtttatgccttggatatttaataaataggaaactcacaaatatgggtagtcatgagttctctctctctctcttttaaagaaaatttcaaaaacaaagtaaaatgagaggaaaaaaaagcttggatatgttagatttaaatccttttaataagcacgaaatacctttcactgagcatctaagagtcttgggttacctctgaattcgtagttagcagaagcaataaaaatacacaaaagtagaagtgggataaaattggactctaattttgagccgggtggaaggactgtaaagccaagctcaggaggagcagttatgtttggcttactggccgcctttttgttaggtttctgtgccgtggttatcagagcactcacctgaagtccagcaacagagcagctgtggctaagtgcctggctcctcttctccctcacacccatgctgacttcagctatatccacaggattcaaagtctcctgggagctgatgcaggtctttaacctcagcaagtggggggggaatcgccctggagtccactgcccagccaccccagctgaactaaggagctccggactctgcaagagaagctgctcaaaatatgatgtggggagcagtggatgaagacccctgatgatggtctttggcttccacgtgtgcacatgtatgtgtgagcacattggatgcacgcacccatagggacatgtgcttataccctccattcacgaagtccgttaggagtgccggagatatcagagagttgtatgttgtcgttcccattccaaaaggaaaatgccagcattttggcagcatatttcagccacttggattgtcacttggtgctaaccaaggcactctggggaggggtggaggcagcagacgggtaggtgtggctttgctgcttctcgccctgggatacttggttatgccgatgttttctagatatctgatagtcttcattaagccacttgccccttaaaaaatccatttcattgctgcaattgctcgagctgtactcatttcaagggctacgcatataaaatattctaaataccctgaaatcagtggaagtgtgtatatcactcagactgcctcaagtgtgcccctggggacaggagcagctcacctcttcccagcccccgccttccgatgctaatgtgtagtaatcagcatggcttcatttactttatttgcagaagcggaaagaggggtttgtaattggatccgtaacttccatcactaatacctctgaagggtgttgactaacttaccattatcatcacttgtgggaagtggaaacacagctgtatttgtcagctcacagaagcacaagcagcctggtaacatgtcagcagaaacgtggtgtagccgctgccccccccccccgcccccgtgggttgttctgtcctctgtcagggctgcacagattttccgacttcaactttcatccataaaagcagtgtaggctcctgtgagctttgtctgcaggccaaagtgtctttagtcacggtggctcttctgatgggtttcattaccttttaaatcatgtattggcctaactaactggctaccagatattcgtgtttgtatacacctcgcctgcttgcaatggatttgaggttaagtgagagatgcctgtgcgtaattgaacttttaaaataagaactcagaagccctgggagggaagatgatctaaatgttcaatgagctgtcactgatacactttctgcttgccagtgctgggtggagctgtggctaacacagagttaaaaataatgtgctgtactgtttgttagtgagcgtcttttactggtgttggaaaggaatcgaagtgagagcatactctctgtttctcagtcctctgacaggatcgatatcacttcccagttgtaatcaagagtcagcaaacaggctggagagatggctcaggctgttgataacatgcttgctgaacaagtgcaaggaaccagttcagatcctagttgtcggggaaaaggggccggccaaggaaacacaccctgagcagaaccaaagaaacacactttggccctggaatcagagccagtgaaagaaatacaccctggccctaaaactacagccaaaggctaaaagggaccagagaaagaaacacacttaggccctgtgcagaaaactaaccaatctctgagtaggagatctagccatcctaagctcagggattgaaatctggccaatccctaccctggaaatctccctggaaaaactccacccctaagaatccctgtataaaccctgtgcctgttcagcttctggccatttgggctgctcagctgtcctctgccaccctggcagagggcagtcactctcctggattcttccctcccaataaatctcttgaatgaggtttgggtgagatgttcttttctaggagcagagacgaccttgggcggagtggagtgaagcagggttgtaacacttgtcattgcccggggaaaccttcccctggctaagcagagttgttacactctgctctccaggatctggagcccaactggccgaactgaccaggaaaccctctcctgccagagcagagctgacacatctggggaagcctttccctgaagcagggcagtaagctgctatgcttactgtgacctgtggtattccttggctcccgagtgccagaatacctttccatcagagctgtaacactcagtattctgtgactcccaagtgccagaattcatccctgtccatcccatccgatctgtcagaatgcttacaccagtccccacctaaaaagctgtaatcttagtgcagtaattagaatgagatgcccccataagtcttgggcatttgactacttggtccccagttgatggttattgagggggattaggagacccttggccttgctggagaaagtatgccactgggggcaggctttgaggtttcaaaagaccatctcaaattagctctctctgcgtcctgtttatggttcaagatatgaactcccctcttctgctctggctgcctgccactgcctcctgcaccccaccatcgtgaaccctaaccctctggaactgtgagccccaagtaaaccttcattctgcaacaatagaaaaattacagaatatgctgagcactgaggaggcagaaacaggaggggccccagagctgactcaggtttgaggcgtgattcttgactgtcactggtgcctagtactgtggtggaaactgtgacacctggggcttttaagtgagtgactactactgtccacaagtgctgcagatgactggggaggtcgtggggaggtgtgactagatctccgtggtggttatgggctgatacagtttagttgagcaataagaagagttcttatgtcacctgtttatgtacgagtgtgcatacgtgcaggagttgtggttcacacgagaggaggtgaagggacagctgtatgagtggattctctccttgtaccatgaggactctggggaccaaactcagatcatcaggtttgatggcgtcctgccttctgtgggcctcagaggcagatgtttttgtcaaacagaaagcgtgttcggaataagaataaaggatgatatttaccgggctgtgtgtggaaggtcagtctcctaggacctgagatggcaatgtgaaatgatgggagtgggtgggggagagtggggtggggggggggggggtgggtggggggggggtgggggcgtcttaattacttgtgaaggactagatagggaagaatccacacgaatagaatgctcgtctcaacgcaccacgcacacggttcactcttccccagcgtgcccagttcttactaacatgacctatagttaatggaacgataatggttttgtaaaacattaagcatcacaaaaaaccggtgcaggcatatgcttcagaaaatacccaccagccccaaagcatcatcaggtcaagtcttttcatggttactgttgtctgaatcctagtttatatcctggtgtcactcaacatctattcaaaggtaagtctgtgataaccgaacccaagagcacacttaattagtcaacgtataagtgaaggaaaacactttaatgtcagagcatcaggtgatattctttatgcatctgtgcatgtgtgcgtgactctgaaacatacagcaatatgctgcatatgtgtttatgtgtgtgcatgcatggatctgtctagagcagcgttctctgtgtgtctgtgtgtaggtgtacctgcctacactgtttgctgattatctgccttttgtaactcagatgtaaatgaagattgtttacgactacacagccgactttccatcccgaacactctctgtggacatgtgaagggtgagatgtcaggacagagtccagctgacattctttctgttgatagatccagtgatagaattttaaatgtctcaaaataagcttttttctgttataacagccaaagagagttgtatgggtattcgagccttattaattagccacaacttggctcaactctggtcttctgtgtctgttgatcagtttgggcttcagaattacttaaaggggcacagaaaggcaccaggtcattgcaatagaacaatactagatactggatggtaaactgttaagttaaagaaagcaacccttcagattaaaaaaaaaaaaaaatccctggatcatgtcacacccaagagactgactgaaattatgcagtatggaaaactgtggtaagcccctgggtaagatttttgttatcaatgaaagaggctccactttagagataattaaattgatgatttcaaggtatgtagttcgctcatctgtctgtatcatatacatacatacgtacgtacataaatacgtatgtgtaagtttttgacagctgtgtaaggcctgtaaaccactatgtgccactctgggggtgggggccttccagtgtcagccagtaaatgtctggctgtgaggcttgtgaggccatgctgacggctgcacacactgcactctgcaactccagtacagaagcagccgtggacacgtaaacaagccggtctgcttgtgtttaccaagtgagacttcattttatgaaacaggtggcagaacagattttacccaggagggttgtttgccaaagcctgctgtaaatggcttttataatcttcacggtttcccatgccccatatctgaaatagcctgctcataatgggctgggcctacacagtggctcagcaagaaagcctcttacccccagcctaatgacccgggttcaacccccaggactcactgatgttaggagagaaccaactctcacaggttatactgtgactaccatgctctgtgacacatgtgtcccagccccataaataaatacgtaagtataaagaatgagaaaaaatgggctattttttctcttttcatttttttttcatccttcaatttttattttttggctcaggctctcatgtggcctgatcttgcctgaacttgttatgtagtcaaagttggatttgaacctcttaaccttcttgccttcatctgtagagtcttgggattatagctgtgtgttgctatgcctggatgtatacatttataatttaaaaagtaaaatatgagtatgtgtttgtgagtgagcatgtgtgtctgagtgcctgagtatggcctacggagccagaggtatgtgaagttacaggcactcgtgagtccacccacataggggctagaaatagaactcaagtcttctggaagatccaatgtgctcataattgctaagccatctctccagtgcatagttctaaattttaattcactttgctttcttctttgttgttgctgttggtgctggggattgaacctaaggagtcagaggcatgcgaggcaagcggaatgccggtgcccttctctttgcgtgtaatcctgtaacaccacacacaagtagagacacacacgagtcacgcttttagtagaagggaaaggaaggcgttagaggtgagcttcctattactttgatgaagcatgaccataagcaactcgtggaggaaagtatttattttgcttacacgtccacaccacagtcttaccactcaggaaatcggtgtgggaactccaggcaggagctgaagcagaagtcatgcaggggcgctgctcactggcttgcgcctcctggtttgctcagcctctttcttctacaccccagaaccacccacagtgggctggcccctcccctagcactcactaattaagaaaatgcatcaaggaccaatctggtggagtcatttccccaactgagggtttggctccctctggtaccaacttgacataaaactagccaggacaaggaccttataatttcacagttgtgtgatttacacattatgtggacagtggactctgacactaaacgaggacccactaagtatataacagggcagacaggtgtgtgctacccattgggccaagaagatggatgagtccactgtgaaccagggatggcactgaatcaggcagagtagaagcaggaggtccaggctcagcacaaaccaaaggcattgggcaggccaaggccgtttctcgcttatgcctgacatgaacttgggaaacagtgcaaagcaaacgtggggtgctcaaatggagtcaactccaattcctggattctgtctgctgagacttgggttggatcttaggccatccagggtatttttatttaacgtgtatacaaaccagagtttgtttttttttaaacccttctctggatttctgcccctttcatcttccttctttcaatgcctgataggtcaaccacctggccacacaaggctcttcccagtctttctctctttgtgctttcctctcccgggcatcgccccctcccgactgctgcctgctttccctctgctccccccccccccccaccgcctcgtctcagaagcttcggaacttcatctccatttatcaagatatttacctgataacaaacaaacaaataagcagaagctcacagtgaaagaaataaaggaatcccatctctcacagcttctgctcgtgttctccttggccctgtagagcaacaagattccacagcgttggaagacggtcagagacatcaggtagcggagtgggccgcctcaggtctagagcacgtgctagtcttacttagggttttagactccttgccctttctggcttctcctccaggacctgacattttcatttcctgtaggcgggaagcctaaggaggaaaggaaactgacttgctctgaagtccccatcgccagctgatttactaactgggaatacgctagagaaagtgcaggtgacctggggcttggacagctcctagggaaagagctggctgttggccgacgatgtgatctgagcctggaggtggaaaagctgagtagaacagagcaaagggcttggttctaggctgtgggtgtttaggagccaatgggacacaggacaaaggaatatcagaagacggctctgtgcttcattcttggcaagagaaggtaggcttgagtgtcaaggttacagacatgcctatagatggtgtttgaaattgtggtggtgattagacttcctagcaaagcacctggaatgaagcaggtaaaaccaagactgaaaacccagagtgatttcaaatgccaaaggcgggctaaagggggggggggcaggaggaaaaggacccccgggggatggctgggaaggagaggtctgagacagtggggtacaaacaggggagctgtgaggctcagcaaggttggacaactggccctgaagtacctggtgaggaagtgcacacctggctttgacatgcagcattcctgtgacagggcaggcagtctgtgttgcaggctcattcccaaactggaccataatgagcaggggagctgaggggtttaaaatatccatgccaggattcctggagtctcttcataccggtgttcccttaggccagtggcattacctaaagacaaacagtaaagagttacgtagacacactcagagggtccagtgtgcaagagccgatctctgcccttgccaagggttgtctctgtgagtctccactctgtgtggtgctctgtatctctcatctatggcacatgctttggactcacaattgtgctaattaaatgggcttgggagttgcactgaggcctcccactcacatgtttgagataaagcaagaggagagaagcatggctgtccaggggctcgttagagcaggaaagagctcagactcgcctggggtccacatgctaagtgggtgcaacaagaggacccaaggtgagctgcaaaagggataaagaaaggtgtctgagtggctggctttcacagagcgccatttctgtgggctggctttccttgtccattcctcctcatcgacccctgtttttattgattctatcctccattcagaagccccccttagcttgctttccatcatagttgatcactcccacctgtttaacaaccagtttaggcacacacatccagagcatctccatggtttagggcgtgagtggggccgggcagccaggcccttcctggcttctcccctggacttgacattttcccatttcctgttcctgtaggcagtagacctgaggtactgaggaggaaggaaattcagtcttgtaattctcccccacctgtccctaggttactcagggcccctccctcagtgaatgtcatgtcctataagcaaaagactaggaagatacccatgttttcttgggcccacccacctccctggccagcccagccagcctcccatcagccctactaccctccagcagcctctgaactctgtttccactttagttcctttccagtccactctccctaaagaagtcaaatgccaccagcgacgccccgtactctggctaatggaggtatgcaccatctggctttggatacccatcatggttgtgctcaaagtacttggcatttgcaccaagtctcactggccgtcagtgagtctttgagattcatattaacgtgatgctctcggtagctccacctacagagaagaaagttggagtacaaaggagcgacagcttttgcccgtggtcatttgaccctgggtcttctcagagcctgtggtgctaactggactcttgacccacctctgtcccattgctcttcaaaaaccacttactccgggatctgaccacgtccttcacaactgtttggtccttgtcactgtggtctctggtggactgtagcctcaggctttgttcttcctgcttctgttcacatgtgcaccccaaactttccctgacacagtagccacagtgaaccccaacaaagagattatgtcatgcccaggctaaccctggtctcagcaccttctgacactcatttcttagcaaaagtcttgtttctgccccccctccctcccttctctccttctttccaagtgttttagagacagactaagtagcccagctggcctcaggctcatgtccatcctcctcctctcagcctcccaatgcagggatttcaagtgtatgttgtcacatgtggcttaaaaatcaaatatatgtagtcttgaaagccttgttgtgtgacctgggccccagtctgtgccttcggcagtttctgcctcactttctctgctcaggatacagagctgtgctctgaaaccacaaattgtagccatggtttgtgtcttttgagcttgctactgttctgttctgttacattttcaggaaaatgatccctgatgatttgattttaaatggcagcctctgttccacgctctcggctttcttctttcttggccccctgataggtccattgtcctgtgtgtttgtggggagttcctggaaggcagggtttttgtcttttcactctcagaccccatcagaggtaacttcgctcacaccagaggctaaccagagtgcagaagtgaggctggagaaccaggcacttagtccacagtcacctgcttttaaaggagatcttttgaaattggattagaataagaggaatttttacatttgcatatgaatagtttgtggatctgataatgttaaaactcacgttccatgtatggataatcaatgatctcattatgtcataacaaggaaatttatactacaggtaacatctttgtccaaagtacctgtgtgcgtgcattcaatatctgtatggttaaatgtcatcctcactggtgcatttttctaaatgagtttgtctaaattttctttcttcccctcctttctctcctgccggcctctgcttttgtttgcaagctgggaccctcaaccttcagaacggtcaggtgccttctggtaactgagtaagcgcctccactctctgaaactttctggcctctttccagttctgctagactgctgaggcctttccaagagctgagattcaccctgcccttgcttgctccattgccgggcaggggcttgttgcaacacagagttcatttgagcaataatctctttctttacaaaccactgcatgaacacaagctgacctttctagtagctgttccttagttaaacagagacagcggtggcctgatagtgctaatctgctgtagctcaggaatagaggagaaatattcacagggtgggagggagtgcccctctctcagtgcctccgacaccacccaggctttacatctggctaatctgtgcacttcacattgcttctgagcctgccagtggttttgtggagcactgtaggaatcgccactataatttcaagcctctaattaacacagctggcagtggctttgccaagactatgagcaactgactcagtcttccaggaggaggtctggtagataggagctgataggagctggagaggaatcctgggctcttcactgagcaagggagtttgcccagggtgtgtggagcaacagtagctgcatcctccagaagccctctgtggtgtgttgtttgccggtgtcacagcaaggcaatcggccttaaaaaggtcaagtgacttgaacgtgttctcgtgaaagatcggtgggaccagcatagtcactcatccagctgtcactctgcctgcacagttgtgattcatcaaaatctcagctccttctgaaggcggtgtctccacctcccggttccttgccctaaaggatgcacaaaaattgccaggagaatgagaacgcctttgacaagagaagcaggaattcattcttcctggtttctttaccatctcaagaaattactgcttgattctagaaataggaattaaaacacgttctaaatatttacatggattatgccaattcatcattttctaaagaggggcctgttggaaagttaaacatgtggatcattttaaagtagagctgtcaaataatgaaaagtaattgggctatctaatcatctgtcggccattgtccatcagtccatccagcaaatatgaaccgccgttgtctgctggacacacatttggataggtggggtagtaaatagtaagtaaaacagaagcaccacccttctagacgttctgcgtgagggagacactgacttaaaataaggatgatttcacactcctgatggtgaggagagatccctgtggtctgtgtatttggtcttaggtatttcccaagccatgtttgaagagccctgcaggaggaggcagagagctgtggtgggtgggaggacccacgtacttctttctggtgcttgcaggactttgtaacacaaactaataaatgacccagagactgatattggggttcagtcttcaagctgaagatcagggaagcaaagcagccaggccactagctctcacctctacctcaggctgaaagggctggtcctgtctccatgagctctcaccaagcctcagactgtaacttctcctcagcgtggctggagaacaaatgcctctctgagaccttgcttctgtcttacatacttccctaatgttgggatgaaaggtgtgagctataattctcttttagactgagtcactcttgtgtagttctacttggccttggactcatagagatccgtctacctcttaatcctgagtcctaggattaaaggtgtgtaccaccacctcctagcttctggctgttgggattaaagttgtgtgcctaacttctatggcttgtggctgactttgcttttctgaatcctcagtcaagctttaataaatcataaataatatatcactacaattccccttttttgtccaatacaaaaagaagtctacaactaacataagaaaaactatatacaaaaagtacaataaatatatacaatatatacagacaagttcatcaacaatgtctcagagaaaatatctagtccatttgcatttgacaattctgagaaactacttcattttctatcctaaattggcgagtccaaagtcttgtagctaatttactttctattctcatttgctttattaaaatactttaatgtgtctcaaagcatttacactttacacatctttagtgaatttcttttctaaatctggtaaacaatgaaaactataactatgctatccagtcttcagctccctcagagactgaagaaggaagtgatattaaccgaataaacaggaagtgtgatcaaatgactccccaaaactgtgagaaatgacagaaacagctggctgtctggacagtcacccaaggttcctctgcagcattgagacatccatctttggcctataggcctagcatctctcacagacatttctgtgaagcaggattttctgaaggagtggactgccttctcttggcaaggtttcgcactcacactttttggtgttttgtttgtccattttggacagcatactgtcagcagcagagacaaaggcacttttcttgcccagtgtcttacctttgccacaaagaaagtaaactccatgtgagcttcttcgatgcccagcatcttctctgaattatattgatgctgccaggagcagacacgtctcattgtcataaaaaaataacctatgttattaaaacattttaaatgtcatattctgtagatctctgaagtgtttgaagcccaccctatgtctgtctttgaaaacacactgaatgtgactacaagttcagttgtaataggtggctaattcctcacctacaggagtagctcaggtaatggggccctctcatatgtgagtctgaagaaaacacatcacttcctgtgtagaaagagggagacccagaagtcttaaagttacacctattaacccgtcgtcagtcacatcaaaaaagacgcaaagtggagggcacttgtctctttcatcagttccacagaagaaaagcggaaaccttaggtgcccctttaggaacccctgttaatgttacttgtgtttgggataagcccatctagtgtgaagaattagtttcttttcttgccttcttttagattatttttgaaagatactgagtataggaagatgccctacatactgtcttttctcagaggtttagtcattcagataatagtgacttatattcttaatcgatgcccctgacaattaaactttatgcccatgccttttattaaatctgtcttgacattttacctgcatgtataactgtgtgagggtgtcgggttcctggaactggagttacagacagtggtgagccactatgtgggtgctggaaattgaaccctgggacctcaggaagaggactgattataattccagcacttgggaggcagagaggcaggaggatctctgagttcaaggccagcctggtctacagagtgagttccaaacagccagggctacacagagatagcatgtcttgaaaacaaaacaaaacaaaaagtcctttaagaaaggaaagtttgttaatttttagttttctgtattttaaagtggatttgtgatgacgaatccaaattgtttctggtaatgatgtctaccgttaggacagaacttggcaaatgttagctggattgaagtcacatgatggtgtctcagtttctgaatcagaaggaggtgctgggatttgcgtttctagctcctgcccccttgcagacacattcttttaggaggggtgtgagcagctgtggagtggagaactgtttccctgtcatgacagctctggcgttttcctcagaaacacatcacagggagagcttacaaaaaatgcttttaagtactttgttctgttgggacattctttctctctctgtctctgtctctgtctctgtctctgtctctgtctctgtctctgtctctgtctctatatgtgtgtgtgtgtgtgtgtgtgtgtgtgtgtgttgtatatttgtggtgcatgtatatgtacagggtacgtgggtattgaatgtgtgggtagtacatgtgtgggtgcctgtatgtttgtgtgtgttacacatggtgtagatggaagttactgtcccccaccaggtcctgcagctgtttagtcccaaataaacacacagaggcttatattaattataactgtgtggtagatggctcaggcttattattggttagctctctcttaattattagcccacaactattaatctgtgtatctccacatgacgtcctaccttcctgataggtctcctcccatggccgctgtctcacagctcactccctgcatccatcttccacaccttctagtctggcagccccacctatacttcctgcctggctatatcctgcctgtccattggccaaaacagctttattcatcaaccaataagaaaagcatatattcacagcacacagaaggacatccccatcacatgtgatagtgtgtgttttgtatttggggaagtgtgtgtgtgtctcgaacgtgtgggtggtacatgtggaggtgcatgtgtgtaagggttggtatttgttttgcatcctaagctttttcttgttatcattaaaggtttttttttttttctaaaattgactttactgtaatttaagacagactctaatagtaggggtgtaaatcatctgaaatatcaagaattttcacctgtaataatcaactctgctcaattccttgttacttttgcatgtaatctttgtcttactttggtcaccactgttatggaaataattaacagatctctaagagccatagtggatttatttaaatattggttatataaaacaaaggatgtttttcaaactcttgtaaagaggctgtggagtagccaggcctggtggctcatgcctgtaatcgaaacattcttggagccagaaacaggtggattgccttgagctccaggctagcctgtgttgtacagtaagctccaggcaagcctttattacacagtaagttccgggccagcctaaactaggacgtgtgtgagtgagggagagagacagtgaagaatagtttgctaataggaggaagaagtattctgggctccctcccccaaaccccttgtggttaatggcaaaggtaaatgtttccttgattcccgtgtcttgagaggatgaattgatcaatgcagagacagacgatttaagcagaagtttacttagcacagcaaaggacagcacattccagaaagaggagggaagggttgggaagggatggccagaagggtgtgttgaagtttcccttccctctcttttagggtacttcttcacatagcccttttgagaggcccaggggacataaacccaccgtgtaggtgactctgctgtgaagtctggctctttgatgatgcaaaccttttcttcgtgcacatgtgtggtgtttgggaaagtgccctggcgtttaggtttctattatagctagaagagcctgcagcttcaaggatgtttgaccacaaggggatttctgaccttccggagaggaccaccaagatgcagctgcgtttccttggttacctcagcattggttccttgcccaccgcatctcaaagggaccaatttcttatttcactgtagaagggtgatgtgtgtgtgtgtgtgtgtgtgtgtgtgtgtgtgtgtgtgtgcacgcaggtgtgatgaaatgccaccctgagatgtcatactttactttggggctcttgtcttttggcctggaggtctgtgtgtcctccacagatgtctttcagggtgtccagtcctagtctgtcaaactctagttctcagaaacgtcactctcatttttttctaatgccaacctttttgttaaccctgctttctttgagttctcaagagcttattttggatgtaaaagaaaatactgttcctccctctttctgatccagttttggtctaaaatatgttctaggcgatatgggcgccggtttgggactagatagcaaggacggttgggaaagagaagaactttgtaacagccactgagcggttggtgaggcgcgaggctccacccacctctgcgttactcctcctgcccccctcttcttccctcactcacctctgacgttctcacccccccttcgggcaactctgccgttttcttcttgagggaagaacccttcctcatggtagtctccgtgtcctgtccgacctcagagcatgctgggagcttttggccgggttttgcaggcaaggttttgtatttccttgaacctgttccgtcctccgctgttgtttcttcagatgggaatgctgctgggtgtaaatgcaccgttcacttattgacctaaacacaaaggcagtcatgtgacttggggatcttcaaacggggaaaaccaactccctgtcagttttaccaattaataatagttgaacatacactgaaaaaaaaaaccttagatagaagtatcaaggtataattaccatagaacagcattctggcacagtcgctggcttttcttgttattgtccagtccttacttggggccatattaaatcaacattgaaatcctagtgatagggagatagatatgaacaagcattttttcaagctgtattcattgttagtggagtttgggactttgtggtcggtcttcatttcccagttttttattttaaaaatatatgatggtgtataagacactgttggtgattatgtatgtttgtgtataaggtttgtgttatacatataggtgcattttatgatatacatacatatacatttagtgttacatttacagtttttactttaaaatttttatgtgtggatattgtgctggctctggtacctgtgcacccagtgcacgcagttcttgaagtggccagcagagggtgctgcatgtcctaggactggagttacaggtggttgtgagctgcccggtgggtgctgggaaccgagcctagaaatagactataatggattaagggttgtgaagagtcaagtaaagggagagagtggtctgactcacagaaggaaacagagtggaaggtgagggcagagaaatagctgattgattgatgtgacgttacttaaggctcatttttggttcggactgaaacttagagaactttattgttaatgctgactggcaccagctctggagagaacttgtcccgtgagctctctggtgacctgttggactacttaaataggcttggtgacttggaacttctgtgtggtgtggttaaacctgctctgttggtgccagggaagagcctatcccaaggcaatggcctctgtgtctttatttttgcattcctgctccttggttgttgttgcaggcctgacctctaccaagagctttgacaaactgatgctacaacctgtttcttggtctcctttatggtgacactgtggtgatatattgtgtatggtttattaaagcttgcctgaggattcagaaagcaaagacagccacgagccatagaagccaggaacacacctttaacccccagccagaagctaggaggtggtagcacacacctttaatcctgggactcaggtagacagatctctgagttcaaggctacccagggatacaagagattgaatcagtgtaaaagagtaacagatcacacgcctttaatcccagcactagaagggtataaaagatagaagcagggacttcagtggtcagcaggaggcatttagtctccagccatgctgaggagaggttacagtctgaggcttggtgacagctctgaaaacaggatcagccctttcagcctgaggtagaggttagaagctagtggccagctgctttgcttttctcatcttctgctagacgtttgaacccctctatcagtctctgggccatttattttttgtgttacatgacactagaagctctgggtttccaagttttgaccttcttcctcaatgtattgctgtgttgccaatagcactcagcgttcctaatcttccactcattcgttctggactcacactaagcagatcttcaatgccatgacataacagctgaggcgaacagcttatgaggagagaaggcttattttagtgcatggtttccaagttttgtggttgtggctttaatgcacaacattgtggccttgaagaggatgggagagatggtggtagaacagagccgtccaccacgccatctgggcagcagggcagaggaagaaaggagaggctgggaccaagggctcatcccaatgacctgactccctcctgtatgccccccccttaaggtcacctcaccttcccatggagtctccagccttcagcataagctgtgggaggactcctaagtttgaagccataacaggtccttacctcttcttcctcccattcctgatcccagtttgtaagtcatgtcagttctaccccctggaactgcccaattcttgccagttgttagtacgccccagtgattctaactttgaggaacacctacaagtcgcagcaagtttcatgactctggatggtcataaaaatctatataattcacatttagttgaatataaaatgtaagtaaaacaagacatcatgatcctaaaaggcaattctaaaaataatcatttcaaaaatgatttgttctggagtcagtggaatgaatatttaattgatcaaactgtcactttccagggtgttgacttgggttttataggtctggattattgcttgaatctgtattgattccttatggtcccatttatattaagacttcatggaaaacaggatgatatgtttacagccttgtaacaccaacaaaatactgactctggaactgaactgtctgaggtcagtactaattgcttttgccagtttctaactgtgtgattgtaggcaagttcacactccctgtgcctcagtttcttcatctgtaaaatggaagtgatgcaagtgtctactccaggatttctgagtaggatctaatgagatcttgtacctaaaagcttgcgggtgggagacagactccgccagggttagtgggttggtgtgacacagtgataccccctaggagtcccctggggaactcagggcagaaatagaacatttgcacttgagagctcaaggagattgcaaggtttcaggagttattcaagtcatctatgaaaaagatactccaagggaatgtgtattaattatctacaaagtgagagaaatacccaacaaatgccttcggtgttcagatgaaaaagatcacttccactggctgaccgaaagcagtttgcagtgacttacagacagggtggggaatgcttggctagagtgcgtgagaagcagagttcagacaccagtgctcacaatacactgggcacacagcacgtggctgccgtaatcctagttctcccacggataacaggctgcctacttggtgagctctacacttaccgagagaccctgtcttcacaaataagatggagaagaatgatagaggtccacctgatgttcacctttgacctccacacacatgcacacatatgtacacgagaagaaattatttatcattagattgttgggtttttaatgcccagtttcaaatacagtgtaatcgaaatctgtgcccataaagcgccagatttgacctggtcctgtgcagaagtacaggttaggaagaactgctattgtagggctgagctccacgaggtgagagagagccatctgggtagagagcccgctttatgtgtctacagcagcgtagcctttgtgttgtttctacagcccgctgccctgctggtcacagtaatttacatgcatgtgtaatttaaaggaatttcatcttcccaatgctgccgtcaacatttcttctctgcggtacaaccgcacatttgttatccagcaaatgtgagcactgattcctttttcttttttcaagacagggtttactctggctatcctggcactctctctgtagaccaggctggccttgaactcacagagatcttcctgcttctgcctcccaagtgctgggattaaaggcgtgcgccaccaccgcccagctgaatgaccgattcttatgcttctcaagtgtagccataaccttcctagaatgtggctaattactgccaacccaggactatgaaagacacacacacacacacacacacacacacacacacacacacacgaatggacagaggaacttcaaagtcttatcccaagagaagggtgcagagacgttaaccctttaattctttttcctgcagttggcccgacacaataaactgcttcagcagatgctcaaaccaggatctgatcccgaagaaggggacgaagccttgaagtattacgccaaccacactgcacagattgaggtacttactcgtgacttttagaaaaatctatttgcttactagctaaggccatttccatgatttttctcagaactgtgaaataatatttgatgatttaagtggaaaagactgtctcgcaggccgatgcctaagagtcacatgtggaaactgaatgtccatcttgcaaagtcttttctctccccagaactagtctgaagtatagatggagtgttttttgttcagcctggccccacagccatttagccccaaataaacacactgaggcttattttaattataaactgtttggctgatggctcaggcttcttactgattttctctctcttaattattaacccatttctgttaacctaagtatttccacgtgctcttggcttactggagaatgcccggcatcctatcttcccagtagctacatggcatctctctggtggcgtctctctgagtcctctctccagaattctcctcatctgatagttccacctatacttcctgcctggctactggccaatctgtgttttattcatcaaccaataagagaaacatatattaatagcatgcagaccggacattccccatggctgaagtttttgaaatggagactaaattttttttctctcgtttgggtcacagaagcagtcagggcagaccagtgacactttagagacaacataattactagagaatctgttccttaaaaattgtgggaacttcttatatggagatcatggtggcacctgtctttactcccagcacgtaggagacagaggcaggcagatctctgtgagctccagaccagtctgggttagaaaagtcaagggcagccagagctacacagagagaccttgcttaaaaaaaaaaaaaaaaaaaaaagcaaaataaaagtatacagaaaacaccggcagcactaatagaattttcatgttggtgtcacacactcaaggtagtcagctgtttacactttgattgtctgacagctaccctctccctgccccataaacgagtcatcatctactgtctggtggcagatcaggaggtgtcacttctagctgggttatcattttgatgcttctgggcagaactaatccgacagaagcaggtagaatggtggccaccttgtcattccaggttcaaaacagcgcatttactcattctggtagatgggttttagtttttagcaggatctatcaccagcaccgtttgctctatggtgggtgatttctatgtcttattgcttatttttgacaactctctgagcgttaataagcaatatcacttcatgccaaaggttgcccttctgctctgtgtgtgaacagcaacagagccacagcttgcatcagatttggctgctacactgacccatgtgttaatgagaacgatagcttggtgtgatcagtttaataactctgggaagtgggaagggttaggcctaatcaccgtccgagaaagaatcccccataatccaaacctcactgtcagcccctcccacgagtctctctgcttcagcagaaagcacgtccagttttaatcagtcagtcattggaaagatttcatgtatctgtgaagagctcacactagaccattgtagttatccaccactcccaatttcccagtgtttgctcccttcagggtgttaggggtgtgcgtgtgcgtgtgtgtgtgtgtgtgtgtgtgtgtgtgtgtgtgcgcgtgggtgtgtgtgtgcgtgcgtgtgggtgtgtgggtgtgtgggtgtgtgggtgtgtgggtgtgtgggtgtgtgggtgtgtgggtgtgtgggtgtgtgggtgtgtgggtgtgtgggtgtgtgggtgtgtgggtgtgtgggtgtgtgggtgtgtgggtgtgtgggtgtgtgggtgtgtgggtgtgtgggtgtgtgggtgtgtgggtgtgtgggtgtgtgggtgtgtgggtgtgtgggtgtgtgggtgtgtgggtgtgtgggtgtgtgggtgtgtgggtgtgtgggtgtgtgggtgtgtgggtgtgtgggtgtgtgggtgtgtgggtgtgtgggtgtgtgggtgtgtgggtgtgtgggtgtgtgggtgtgtgggtgtgtgggtgtgtgggtgtgtgggtgtgtgggtgtgtgggtgtgtgggtgtgtgggtgtgtgggtgtgtgggtgtgtgggtgtgtgggtgtgtgggtgtgtgggtgtgtgggtgtgtgggtgtgtgggtgtgtgggtgtgtgggtgtgtgggtgtgtgggtgtgtgggtgtgtgggtgtgtgggtgtgtgggtgtgtgggtgtgtgggtgtgtgggtgtgtgggtgtgtgggtgtgtgggtgtgtgggtgtgtgggtgtgtgggtgtgtgggtgtgtgggtgtgtgggtgtgtgggtgtgtgggtgtgtgggtgtgtgggtgtgtgggtgtgtgggtgtgtgggtgtgtgggtgtgtgggtgtgtgggtgtgtgggtgtgtgggtgtgtgggtgtgtgggtgtgtgggtgtgtgggtgtgtgggtgtgtgtgtgtgtgtgtgtgtgtttgcatgcttttgcatatgtgtgtggtcatgttcgtttgcacaggagaggcccaggctgatatcaagaatcatcctctgctattattcttccaccttactcactgaggcgggctctgccatctgaacccagagcctgctaacacggctcctcttctaaacagcttgctctgaggatcccctggctcttccttccatggctggaatgacagggcgctggcacacccagccaaggcttagtgggtctgtggagatctgagctctggccctcatattttcatggcaagtgcttttaaccagcaagctgtctcctcagcccttggggattatcttgttttcttcactttcagtaccatagtgctgctagctaatgactgagtgagcattcattaaataatcgggggaaaaattaaccatatttggctttcttcggttaatgcatttccttcagcagtttctctggtttgtcattgccctttgtaaaatgtgacaaccagaactaaacatgtcattttatgcagggactgaatattttggcttatctaatcaaagcttattttctttagtaagccctaagaatttcttttttaaaatacttgacactcttaactttcttttcacatggttgcctatcataccaaatatatctaagtagtttgtacaattgatattctaacctttttaagttagcatataaaggggctggagaggtgatccaggagttgagagctctggctgctgtggcagaggcctgtattctggtcccggcacccacggggcagctcacaactacccacacctccagttccaggatcaaaaccaacttagagaagggagattttatttttggcttaaggttccagaggaagagtccataagtcagggtaggcacagcactatggcaggggcgtgaagctgactggtcatattttattcctatgcaggagggtaatggaagagaaaacaagaatataaactctcaaatccacccccagtgacacacttctccagcacggctgcacctcctaaaggttccatggtctccccaaactgtgccaccaactggggagcaagagttcacacacataagcccatgagggacatttctcattcaaaacaccaaactgtaggtgggacaacactttaatgataaataaagatacctctctgtgtatagagaactcaggacacacaatgctaatatcatctgtttcccagagcccctcttaggaagaacaggacacaaatgcttacgtactaggttcaaggtcacccagctggtttacctttttcataattggattcataaaaatatcattcataaactcattgttctagtttcatgtctgttcccatgataaaaacagtcttgccaaaaccaacctggggaggaaaggatttctttggtttataactgcatgggagacattaccatggtaacctgagctagacactgtaaagaatgctggctcacctgggcttatgcttagctagtgttctgacacattccaggaccacaggcctggggatggcgctggcatggtgggcttgatcctcctatatcaatcaataataaagatgcccacagaccaaccagatcgaggggcttcctcaacagagcctccttccaaatgactcagagttgtgtcaagttgacagtgagaactaaggaaagcttggcacccagctgtacatccactaggtgaccccactcggcgcttctgggtagttcagaattggaagccacacggatggtcctagtcaaaatctatgggggcaaccaaccaaaaccaggaagtaaggagaacaggaaagagttctacagggaagaagcaggcctcggggaatgagggaatggcggtgatggtaactgaaatgtacgtattacatgcttgcatggacttgtcaaagaactaaacgtggcaatcaagaaaagggaagttaaaagtggagtccagggctgaggtgtgcaaatggctgaaaacaaatgaaactcgtttccagattgtgcggcacgacaggactatggagcagattgtcttccctgtccccaacatctgcgagttcctcacccgggaatccaagtaccgagtgttcaacaccacggagagagacgagcagggaagcaaggtgaatgacttcttccagcaaacagaggacctctacaacgagatgaaatggcagaagaagatcagaagtgagtctgaatgaagaggcgtgtttaacgtccccgagatcacttgcagggtggagcgtgtgcagaggcatgtttaatgtccccgagatcacttgcagggtggagcgtgtgcagaggcgtgtttaatgtccccgagatcacttgcagggtggagcgtgtcagccctcctgtcactgaagctgagcggtctgcagctcagtggacgcagaaatcccaggttaatgagatggcctgcagcttctgagcatgcttgttaatgtattatgaactgcaaggctgcagctgcattgttgcactgccggatggctgcaggtgtgaaatcctgcactgactccttgccctcaacactcagtgtatgtgtgggacaatatcctcatcagtgctctcacccagtgtcctacggtcagatagggctcccccccctggtttcccctcccctctcttcctctccatctgtaactctgtatgtgtttagacagggtctcacagctcagtgagtcctcaaattcactatgcagccatagatgactaagtacgtgatgttcctgcctccacctctcaagtattacttaagagtttttccaggagtcattctttcttctacctcccacccccatctaaatccaccaagcgaaacatttccaaacagctgtagtcagagagagtcaagtgatattgcagtcaaagccatcgccacgcagctctctctttgcaacctaacctgtaacataactctcctatgtatttgaaaacactgagtttgaatttttttttaattttaatttttaaatcattttcttgaggctgtggagatggcctagaagttaagagcatgtattgttctttcagaggacctgggttctattccttgcacctacgtggcagctcataattatccataactccagtttcagggttctggcatcctcttctagcctccagggcaccaagtgcacacatggtccacaaggcaacactcatatgcacataaaattaaagccttcatttgaaaaatctttttaagttgttttctaaaataacagaagttgaggaggggcggtcagtcctcttgagattagatcttcattgtctttggagactttcccagacaggtgggcatgtgtattatccattctccaccattcagttttctccgctctttactgagagagattaggagtatgaccagaactggtcagaggctctgttgggtataagataatgtcatgcagctttagttttctacaacactgtttctctttagaatcttgccacatagaactcagcaaaaaaagattggagcacctaatatatatgtggattattcaaaatttttatttgagatatttgaaaaaaataatttttcttcatgtaaaattaattgaatagcaagctcaaattaattcaaagttaatttagtaagaaactgggactctgttttatgacaagtattttttaataaaaaaataaaccttaaaataattcctagtggacattgtattttaaattctagaagcagagtatagaacaaaggtagaggcagaatctaaatgtttttgtgggctgatagaaacagaggaatgacagtggtgttgatgtctacaggccatgatctgttgcccagggggacagcattctgccacagcccctctcactgtggaacaccctctccaagacgagaaaaatgagctgatctcaggaggagacagtttgttagtcaatggcccagactggggtttgctctagatcccaaaagtggttttcattttatatgcctcatcccactgactctgacattttatcttgaaggttttaatcctaatttttaattatgtatatatgtatgtgccttttgtaggcttgtgcccacatgtgtctagtgcctgcaggagccagaagagggtgtcatagcccttgggtctgggttacaggcaattgttacctagttacaagttgaataatagacaagacccagaggagccgctaggtgcccagagtaggctgacagtttagctcctccaacacccccctcctgccctatatatttgctcagttatttagaagtggaaagaacagagtttctggcaagcactgtttagtagattcattcatcagctcatttctgatgacagacatgtattcccttttctagaaattcccgttttctttcaaactaatacccagccttctgcctcagctcctcagatgctgagacttcaagcctgagaaaccacgctggcttgagtaggttacatttctctagctcccatccatgctgtgctgcagcgatgagactcaggctttaaggtaactgactgagcatttccagtggggggaccatccaagtctgcagtcctggcttttatgacttcacaccataagaataagaccagtttacccatcagtattacttacagcacatatgtgcctgtgcccttcagtaaaaggtccccagaccaactagctgccttccccttaatctgcacgggccagatgcaaggggtttttactgcagaatcaccttcgctgacactcttgaaggacagaaaaggaaccaactaggaaatgcctttgccatctagagtctcacagtaagcttcctaagattagacacaatcacttcagatgcacgtctgtgactgttcacaggcacgttgcacacaccgttagcttagtggggctcccgtcgaccgcagcaataactgaccattctcacccttgtacttgttgcttcctagacaaccccgccctgttctggttctccaggcacatctccctctgggggagcgtctccttcaacctggctgtgttcatcaacctggctgtggctctcttctaccctttcggggatgatggcgatgaaggcaagtgcttgcatttctgcaaataatgactgcctgaaaattcccaaattacattcactaactctttgcagatttaaaataaagaagcttagtttgtgttaatttttttctgtatttattgcaagcacagagatattaagtagagtagacagaaaactgtggctggtagaaatgtccttatatagaaagctcatatgtagcatagctattagggctaagtattgaaaaatgaaatggcatgattgtgtttcaacctaattagtgttttataatgttttatctcagttatgtgagaatcttacatccaagcattttgatgagatagcaacaattacatcttactttctgtcttgtctaagggttttgattctataccagtgtgcatttataatattcataatcttagtcttttgaatacacagcataagacagactgtaatgatggacaaggaaggatgttgactattaaatcagtgttattaaattagtaatgcatgagcttttacaaaggcaaagaagggggaaattccatagaaaccaggtggggctttcagaaacattttgtttaggtttgacagattgctttggaaaaaaatctgttacaggtgtggggtacacttgggagagtagaatgggttggagacagagatgagagaaatcagcaaataataacctgagagcgtcctcagagcacatctgctcgtggggtgttaggttaatgagatgctgtcaacagagcacgtggaatgatgtcctgacagtttggcaaggagtagttgttacaaggtaaatattgtcactgccatcccaggggacacgggggagagggtgccataacagcaacagatatgtaagcaaatttcagatggacgggagtgaagagaagagattggagcccaagatcaacttcctgtttcccagtctctacatcaggtcccaccggtgtcaacgtctctgtcttggctgcaggttgagctgcataagtagagctgggggagcaagggggttacagaaagcacatcggagattggggatctcagacagtagagcatgtgtgtgactgcagagcaggaaataggcagcaggcatgtgtccgtctaccatgtcagcagaagcaaggcagcaaaaatgtcgtttgtgcaccacacaggtggaagtgggaacagccttctctcccctgggtctgggcttctctggtgatgagatcttgacacagaggggcacgactcttgagaggtaaagccccaccataaaatgataaattcatatcacctgcactcggaccactgaggatgcaggacagagttccaggaaagagaggcagggaatctttaagatggaagcatatctggaaatcatctaacaccatttgactgactacacaaggaaagcccaggggagcccttcagcctctaaatgaagcagacctaacaaatgcgaggctgcaaagcacagatctccaggctttgtggagcctggtgcctgcacacagatgcacgcatctctcttgaaaaggatttctgagtcagcagtaggagcaagatggatcctcagtcgtaggatgcgagtgtgtggctttttagaaggagggcaagcatgagaattgggggagcataggaccctgtcatgagcctgagttggatgattagtttgggtgaattatctcacaacaactttaggaataaggttaaagtctagattgaggttggcacaatcactatctcaagcttatcaaagacaaagattaggagctgttcaaactaaagacagagggatgaagtagatgacagtattgttcctggtgttgacattcatggttatcagtcatgcaatgtactgatatttgcatctagatgaagggtcttcatggcggtttttccattattcttgcagctattgcttaagtcttaaggaactttggtataaaatttaaaaaatagaaacaaggttctacgtattcctatagtatcatcatttggggcagggaaggcaatcatgaagccgtctggaaaatttgggccagagatggacctctgttaacacgggccacactttcccaccctgggccctactacaagcggcttgagagccacagagctgtcatggcaagggccagcagaggcatgggctggtcttcctccagttccaatgaatggtgaggtgtcacccaggctcttggaagtgtcttgagatcaactgtcttgttcacaggtgggttacaatgtcagtttagaaaatagtgtcctccattcacaatgatggcacaaagggatccaagggagatgttgcctctcagataaacactccaaggcaccatctccctccactgtagatggaaactccctcttaactgccaggaattatgtggaatctgttgatgctagggccatctccagccatgccaactgacccttcctagaagactagtcagtggagaactttttatcccaagatagaattatcaattttaaatctagagggaggatttttcttcacatattaagtgtaattcctcctcacaaacatttttgcttaggaaaataagattcttccaggtgatttcaatccactgggttccataagcatttatgggtaccattgtgtactacgcaccatgctaggctgagagatgctgagattagtaaagctgttttgtcctcaaggatctcatggtctggttaaggaccaagaaatgagaaaggcacaagagcaaggaccaccagtgggtttatagatagatgttgactttattggacctgggtgtaggaagaaggagtctaatgagcctgcacagaaagcccagacttggagaaggctgaggagtgagaagcagctgtgtttggcaggaggccatgaacaaatcagcccgaggcagggctccaagacaagtgtggaaatgaagtccaattttactgtctgaattttcttttatagaggaccagcttctaacatcttagaaagaataaattcctaaaaatatcttcccattaaatataataagacttattatggaaaattaatagaaatatgcaaaatattaagggaaagagtttccacttggtgggtaaggattggcactgctgcttggtattgctttggttttggttatttgtttgtttgagagacgagatctctctgagtcgcccaggttggcctagaattcactatgtagtgtaggccagccttgaactcacatcagtcttcagcttcctaagtgtttggatacaggcataagtcaccatactccactgagattggctttgaaaaatcttagcacctgtctttaggtgtgtcagagagatttatttttttccaaggcataaatcctcaggtcagaactaacctgatggttctcacagatggccacagaattcaaccttaattaactgcattaaatgactgttgatcttattttctcattccacacagatgtactcagtagcaagctgtgtgcaaggtcctgtgctagacagtccacaagttacttgtaaaaatggataaaacacccagttttaagtgcatagttttgcctttttgtatatcaaggggagaacccagcgggccgcaaacatctgggacagagtaaaggtgtggttagatcatctggcactggtgatagtttgcagaatgagcatttgtgccaaatcacagaatatcataccagactttatttatgagttagtctgacgagtcacatgataggaagaacactgtcaaatgttccctgaagatgtcaattttaatgcattcttaaaagaaaagctgggggatgctagagaaacatcttagcatgatttgctctgttgtctgagcagagtttgggtcttagcactcacatagggtggtacacaaatgcctatgactccagctccaagggatttaggatcctcttctggcctctgtgggcatctacacacatacatacacacacacacacacacacacacacacacacacacacacacacaccatgcacactctcacacacacgggcgctcgtgcacatacacagaacacacgttaaatagaataaaataatttttaaaagaagaaagccagggacttaggaaatggtttggccagcagagtgacagccacacaagcctgaagacctgactgtggatgtccagagcccatgtagaaagccaggtgcagctggggattaataaatatttagtggcttgctcagtatgaactccctgagcatattttgtctgcttgatagaccagtattatttactgctgcaagacacactgtggcaggataagactaccttgcacccttatagagtttgtgttttcatggagacctgagagtcaacacacatgtagtcggacattaaaggcactcaccctgtactgctctgggagagctgtcaaatcaaggcagatggtggctaggcttgcttttgctaggcagagcacatatataagccaatatcaaaaggaggctgtccattctgacaatgaggacggcgagctctttcttcccaatctttaaaaaatcgcttaaaatcttatttagttaacatgtgtgggtgttctgtctgcacatatgtccatgtaccgtgtacatagttggtgcctgtggagtccagaagagggtgttggatcccctaggactagagttgcagacagttgtgagccactattggattgttgggaattgaacccaggtcctctggaagagcagcaagtgctcttaatctctgagccagctctatggctccatcactgtttgtttggaagctgttatggcaacaaaagtgttgctacaataaaacacctgattctgggtgtttcataaggcaaacgtttatataattcccggttttggatgctggaagtccatgattgggtgtcatcatctgtccagtccaggtggggaccctccttggttccatcacaattttatggggaagctgcaagggatgtggctgtgtggagaaggggccaggcgagcaggggggctgcactttgcatcatgctctcccgggagtgtctggtgccgcccccccgcaaccccgacaatgccaatcccttctaaagacagagctctgtaatccggtttcctgctgcaggtaccacatctaaagactccattgccttagtcatatttcacaaggaccacgcttgaagtctggagcctctggggaaacagtcacagcacacaccgcacctaaaccacagtagagaacatgatgcagagccaggatccaagcacaggatctaaattagtgttttttttttttcatggattgtttgatggtagttgaaatgtttgacaaattacaaaaatctttgtaatgtttcaatgcattggcccccagtgaatacaacatttattaaaggatgtgtctgggtcacctcagggttttgatgcggatccaaagcttttctcatgaaagcactcaaggtgttttgtgtcagaagtcagttttagggtagaaagaagtggctgaaagaatgagcacccgtatggggttttggcccaggaggctggggagaaatctccagtttgttgttttcttcttgagtcctggtacccttcagtggaggcaataatgtggtgcccaaagttccttctgcagatgcagcacacgccacgcttgagaagggctgtcatcgattgtctcatccgtacacatgacagaattgcacttctttttcgagggaaaattttaaaacctcctttgtgagaaatttctaaggaacttgtttttttttaagtttatttaaaaatcattggagatttttcttatgcttctatgtgtgtgtgcatgagtgcatatatgtgtgtctgtgtacatgactgcatgtgtgtatagcttcatgtgtgtgcaagactgcattgtgcatgcatgtgtgtgtatgtgtgcatgactgcatgtgtgagtgtgcctgtgtgtgtatgtgcatgactacatgtgtgcatgtgtatgtgcatgactgcatgtgtgtatgtgtatatgtgcatgactgcatgtgtgtatgtgtatatgtgcatgactgcatgtgtgtgtgtgtgcatgactgcatgtgtgcatgtgtatatgtgcatgattgcatgtgtgtgcatgactgcatatgtatgttatatatgtgcacgactgcatatgtatgttgtgtatgtgcacatgcatgtgtgcatgcgtgtgtgtgcatgactgtgtgtgtgcatatgtatacatgcatgattgcatgaatatgtgtgtgtgcatgactgcacgtgtgcatgcatgtgcatgactgcatgtgtgcgtgcgtgtgcatgactgcatgtgtgcatgtgtgtgcaggcacacacgcatttttgtgcatgggtatgtgtatataggtgagtgtgtgcgtgtctgtggaaggcagaggtcaggacatcactcaccttgtattttgagacaaggtccctcaatggcctggaagtcacccatcccgctagactggccagcaagccccagggctctgcctgtcactgcagccttagcaccaccatccaaatgttaggcttaattcctgggggtctggagatcaaatccacatcctcatgctcatgaggcaagctcttccctggctggctatctgcccagctccatatttcctgatgattaaatattgttggaacttgagtcagtcttcaagtgtgtccattcatattcctacactcatatgaagactcaggtgttttaaaatataaaaatacatgtgcgtgtgttttaacacttaaagctttctcagatgtagtcacatgtgtgtgggttttaacacccaaagcatatctctatttcataaaatgtaaggttctataaactgggttcttttatttttgtttttttacatttgttatttattctgctgtctctttcctgtgtatgtgtctgtgtggaggtgagagttggctctcttcctctgctgtgtggtttctggggatcaaacccaagtcattgagcctggcagcaagaaccttcatctgctgagccatcttgctggcctgaactagattcttttgaggactccataatgggataatttgattctaatacaacaagggaatgatgaaggactatacctgatttcccacaatcatcaatcatcaatttgacttgaagttcccaagtgaagtacatttatcaaaagtatttcataaatcactcccgcaggagagaaagtagagttctcagactcgaagtgaagaatggtgactgctcttggactttcttgttgggacctccagctcctcaatgacactgaaacttactagtcaagaaagctttcctgtggtagaaagttgactgggttattctgagatttgtgcaccatggctttgtttgcatatgaagcacagaagccaaaactttggtgttttctatctgtgttttcttggtgacaagtaatccctgctcctttttccaggtacgctttccccgttgttctcggttctcctttggatagcagtagcgatctgcacatctatgctgtttttcttctccaagcctgtgggtatccggccatttcttgtgtctatcatgctcagatcaatatacaccatcggtctggggccaacactaatacttcttggtgctgctaatgtaagtacattgcttaactttgtatcttatggaattcagatgtattgagtgtaaatatggttaactatgcttttatttatgtgtatgcagtgaattctggtttgatataaatttatgttaactaaagtatcatttttacttgctttaatttagagagagagagagagagagagagagagagagaacaaaaagatgagtaacacattgataggtttaagtagcccttacagtgtgacccagttcggctgtccctttcatcaggtttaatgtcctcccagtaccatatctgccattactgaaaaaaatagcccagctactgttaacaactgaaagtgggttctaagtcatcccaaaagattgaattatgttcaatagaatttaagaaatacctcctatcaaatggcttgtttgggggagaaaagtgtgctaggcaaaaaatgaggtccaaaattgggctccttttatatgagaaaatcctataaacttataaaaggcctgggtgagattcttttcgccaaactttagtatattagaacaagaaaatgcttttgacaatgttagttttaagtgtggaatgaacaaactggaagtatcatgccaagaagcaaatgaaagatttgtagatgtaatttaaacaaaacaaacaaacaaacaaaaaacttgaatggactctgggccaatttcaggcaaggaatatctgtaaatggatatgaagaaaaggtaaatcatcaaactgatgaaataacaaatggtcagaaatcacataaatgctattgtagctacataattaattccgaaagcactgcctgtaactattgtcaggttcctaactcaatgttcagtactctggtgttatctcctatattaccttacatacttattaaggatagtgattgatcatgaaatcctgggacatcacagggagtctataaatattttggaataagtagctaatgagcaagtggatggatctgtggccactatgtattgaaaataaatgagctaaccaacttttaaagattgccaagatgagacaatatatagtcacttctatgttttcagtgtttctgaccttgattttattacaactcttcaatgttggacagcattccacagttcccagttgttagaatattaaaaaaaaaaaagaaaattttcagtttccatcagtgaagtaaagtgtgagcagaggcttttgaaagttaccagatgcccccttctctgggtttcttagggcttagatatcacattaatgcatgaacctggtccttgctcagccccatctccgtgttcctgtgtgatctggcccttgttctcccctgtctcaatggggcaatgcaattcattccttctggctcactccaccctgtctttgacatctgaacattcagaggcgattccatgatctgagttcgttttgtctttgctttgaaaataagctgacgttgtcaaatcatcaaccaaggtaattataggatcatcacaaagtgtataaacgtgtctatacctctgtgttgggctcattttgtgtctctagaaaacatgttcagcatgaaattgtattatttgaggaatcagatgttattcataaactgatcattgactaaatgagaaaaatccaagtttaagaaagtgaagaatagctaagcagagttgtcccccaaaataacaaacattctctgcacctgttatgtaatatgatgggcatttagagcaccaagaggtaggcaatgtgcagcttgccatctagaatttatgtgccactttctgtctctttctttctgtttccttttaaatttctggaccaagacgatgtagacagaggtaaggaaaacatttgaatgtttggggtgggcgtgaaccaaaaacatctggtgttcttttcctgtctcttgtaggacactataaagtgataacttccatgtgctttggtgaaaatcatctcaccataaaaaaaaatctctaccaaagccaagtttttttttttaactgcttcacgagaaagtattatgcatgtagacatgtctgtattgctaattccatgaattttccagtattccaatagcataaaacatgttactcaacaagacactaccaccagcctagggtcatctgactaaagaaaataatctatgtcgatttgaggcaaatttaatgaaattattataatttgatactacttcagatgttaatagaaaagtttatatttataatttaaagttgtgtttgctaccaaaagaataataaaattattttagtgaattactatatactttctcttcacataaattcgttacacaagtttcttagtttatctttactaatgggacaggaaaaataaagtaaaacatgaatcctatactaatgtaccttggtattaactacatattaataataatatgaattaatatgttaattaatttaatttgtacatagacatttgcattgtatagcaatgagaagctgtcattgctgaaataatagatatcagaaaaaccagaagaaaacattagcctgacagtttagccataacaagaggcaggatttgagacatcagatataaatcagccaatgtctgatttcatccttcttgtcagttggagtacggtatggacaactggtctaccctcatctggatgctgagatctgttgagaatcttggtatggaagatccagaaaagaacagtaactgttatattgatacactggtgataacatctaccatttaccaagtatcccctgtgcagatcattaatgaatcaatcagaaagtgttgccatatgatgtgtctgtgtcttagcgcatacagtaacttgtctgtagactctgtccttcataatgttaagcaaatatgaaaagtctcttttacaagaaaggaaatataatagaaggaatacctcagaatttatcagtttctagtttattatgctaaaatcgaattcgtttgtaaagtttgaagtttgtccacatttcaggtagattttcctgtcacagttgtctcagaaaactcagtaattttgagtgctgcaaagtatatcttacacagttttcttctcgtgcacagtgtggcctctttagctaatgttggtacaaattaacattctgaacaatacagaggcacattctataaatgcttaatgttgttcacatcactgaatatttttgcaaacctcatttatacagatgtagtatttcctgtttttaaggagattactgattcattagatggctgttatatcctcattaatcactccatttatctgtgtggcttagattatttgtagtaaagaaaagcatagtaaattatcagtaaagattttccttctgatgctaggaactgaaccccgagcctcacacatactaggcaagtactctaccactgagccacaccccaatccccacagtgaaataccttttaacattttctaaagagatctacttacactgttgtcttagttaggattttattgctgtgaagagacaccatgaccatggcagctcttataaaggaaaacatttaattgggggctggcttacagttcagaggtttagtccattatcatcatggcaggaagcctggtggcatgcagggagacatggggctgaagaagtagctgagagtgaatgtcacactagacctggcttgagcatttgagacctcaaagcaaacccccttagtgacatacctcccccaacaaagccacacctactccaacatggccactcctccatgccctgtgagcctgtgggggctatatctattcaaataaccgcactttacccccttctaataatggctggggacctgtgattcacttagtggtgctagcctttcttacggttattttaacgtgacacggtagagtgtgttctccccactttgcaagagggaaaagcaaataaggctttggtatcgagccagactattgacagttcccacaggctcagctgaatgaatggtgttctgagcggtgtgtgtgtagtttcatgggtgaccacatgacacgttagtctataggattgtgtcctgtcatacagtcactaaacacacaagttcagttcatgatctgaaactttcccttcatattatctctctctttcaaatacacacacggtgttttgtttaatatggtcaccgggtaccactatttctgcctttcagttgtaaaaaaccaaagcctctctgaggttgtgttgggtgtcataagtgatgctgctcacatcgtctgtgtttattatactgttctgctggcagtttcaaagattcccagggtggtatttgactgtgtgtaaatttttatttacatagtgaccttaagattttatcctgcctgaggtgtaacccacatacctggagatcattgaattaaatcatcttatgttttaccttccatcagcagactgtctgttgtttttccacttgacaatttattcttggaaaataggtcatgttttcccatagtaatagcacaaatgaggattacatattcttctcaggaagagagtcttgaataagaccaaaggaataacactatcgccaacacttagcagtggtcagtttctgtgaccatataaaataacaaaaagatgtcacaaaaattatggggccaggaggcgtctttaatggcttcagtctggggctggagataaggctcagtgttaagaacatttgctgtttttgtttttctgaagacccaggtcagctcccagcaccaaagtcagacagctcaaaaccatctcaaatggctcgtcctcacctgccccaaaaggtactgcacacacatgggtgacacacacattcatataaataaataacaagataaattctgagtaacgattaccttctaggcacatattatagacgtgaacaaagtcctctagaaacagagggatgtgtcaagaatgaagtcagtgacttctgtctttcacttcaccacatcactgaaagtcctgcaaagacatgtctaccacttgtgagcatacatgaagatatcacactgccgtgtgattcaccagggtgcaatcaatactcattcttcactagacactaactcataagcaaacattaatgtcacccttgctgtgacaaggggagctcttggtaaacaggttggttagcatgctgatttctgtgagacccagagaactgtgtggagctgtttctccacccttccttcttcactattactcaagtcatccaccaaagtgacactgtgggcaactttgaggaataaatagaaaaagtgaaacaaaatgtgtggtgctgttggcatctgtgctgctgtttcaggactgcttccagcagctcagaagagcagggccctgtagccacctcagcccaccatcacgcatcgcccacggggatgcttgccacagaactgattggctgcagcatcctcatgaggccgacatagaaagaccggctccatgtcaatgaagtcatgacacaagcaggaagaaggtgatctcggctctttattcctccaccaagtcccagctctcatggaaagtgccacacacaaaaaaaatttacaaatttcttcatgccacagaaactggactctcagttctttcctgccctttattcttgcattcatttgtccttggcataaactccttaaacacaaggaccgcttccgcctctgaactctgtgtgaacccatggcaaagccaccacacccgtcaactcattccacttccagatgtctctagaacaacagttctcagcctgagggtcacaacccctttgggggtcgactggccttttcacaggggtcacaatatcctgtatatcagatatttacatttgctcataacagtacagtagcaaaattatagctatgaagtagcaaggaaagtaattttatgtttgggggtccccacaacataaggaactgtattcaagtgttgcaacgttaggaaggttgagaaccactgccctagagaacagaagcatatgcaccccgttacatacaagtcaagggtcgtgcagcgccacccgggtaaacaagcaaagcaaatctctctttatttttcacgttaacatgaccgagccctgctcaggcagaaatgcatcttgtcttttacactttgtaaccaaaatttattgatcattttgagaattcagtttagtctgttcctccccagtatatctgcttcataaacagtttccctgtgtgttttttgtaactcatcgtagaaaatgaggaaatgacacagaaagcatatgtctgtgtcatacaattacccttgtgagggggtctttattctacttttgtataaatccctctctctatcacatcgatgaacctgggtgggcaagtccaggtaagttggtaagttttgtaattttggacagggtttctcaaaagcaattcagaataacggctggatgttgctttgccagacattcatctcacccttgttgtgcatccagcttgtggccagacacaggacctttgtgtgtattcattgcttgggttttgagcagttttctttcctgctcttagagagccactctgaagtctccgtcgtgtctcagtgctactgagtgacaacataaaccgcctaacagtgaaataaggctcctgcttgattgacagctgctgaagttgttgaaagtgggtggaaggtgtttgagattattactggttattgagagggtggacagctagttggggacatggaggagagagtctgcctttagtggctgtgttgttgttctgactagaccttcataacatgcaataattaccagtttttcattttatctgtatggattcagacttcaggatgtcggtggaaaagagtttgtattctctcaagtttgataacatgtatgtgtgtgtatatgtatgtaatacatgtgtgtgtatgatatacataatcagtgttgcaaagagcgtcctattttcctaaaggcatacatataaatacacagtcataagtatctaaggaacatttgaagagtcattgtagtaattgctctggccatgtcatgtcatctgggcttctgtgaggtaaaacctcctcacagcaggttttcagaaaccatcaaggcttcccatggaaagaactaggttgtccaagagtaaggaaaagccagatttacactcatccatgttggtgacagagctagggtctcattctctgtccctgtagctacagagtgagccagttctgtgttgttcacatgtgcattggcagactgcttgaaaaacaacccaggagggctctgagaacggaaaccacaacttaggaatactcctctttcggtgtcttgttctgcggatactgtgaagcactaaaatcccactttctcctccgtttagctatgtaataaaatcgtgttcctggtgagttttgtgggaaatcgaggcacattcacccgaggttatcgagcggtcatcctggacatggcctttctctaccatgtggcgtacgtcctggtttgcatgctcggcctctttgtccacgagttcttctacagcttcctggtgagtacagccatagggacaattgccgctgggcacgggatgcagcaccgtacaccttagactcccagttggtttcttttggtttggtttattgttgtttgttttatttatttgttttttagcagggcacaaattatgttatttttggtatttcctaggagaagtgtgtgtgtggggtcttttctctgggaagtacataggtgatggaattctattctttgctgagaagtaagaaacttccttgactcttctcttggcccaggctttgggttttcagccaagtaatatttccttaattcactgattatccagatgcaaagggacaaataaggatgtatatcttatctataatgtcaaagttacattagtcattacggtagtatgtaagcaaaatgagaaggaacaaaagccatcctagcaaaagagcaagctgtttaaagtatagattagcttaggtcatcatcattagtttatgatttagctcccattaccattgttagcttatgtcatctgggctaagcttatctatgtatatttaaatctttagacagttccccccccctgcccccggattccttttttttttttttttttttttgttctaagatgacttgcttcgctgtgtagcccaggctggcctctaactcacagtttcccacctcagcctctgtgctggggaggtgcctgtgtgcctacacacaactgtacatccttcttaaagatgcctctcattcttaaatgccattttcctttctctgtttacactgttttatagtcatgaatgggggaaaggagttggtgtaaaaacatggtaagcttgaatctgtgagcgatatttgagtgtgcacatataagtatgtggcagtgcaggcaaagtcagacctgcttgggagtcacccctcacccctcacccctcaccccacacccctcaccttgtttgaggcagagtttctcatttcatcattatgaatgccacctactctggcctctgatgagttaaaataaaacctcctttatgtgaaccagagtggtgaaaaagttgaagaaaccagaacattgacaatctagaggttgagtttgcattaattcatctttattgaagaatattgactttgtttctaacaatagctgtacttcccaagagataaaaagataacaaggtagtgatttttttttttttaagaatttgacacatcaaatgccagtgtcttaaagacaggttctgcatagcagtgattatcaaggctgtgattgattacagtggaaattaatggtgtaactctcgcacacagcagaccaggggattttcaaaggacacacacacctgacagattgttccaggccagctagattgtagttcttatccccagataagaacacaaaccccaagtctccaggtttgaagatcggattcatttccaaacatttttggacatttctgaaaatgaatataattttatttcttttaagtgcctctgtataataaaacatgcactcgctaattcataatttcagctttataatgcagcaatgtgtaaaacggttcccagcattggctgcaggcagcagacatgtgcttgagttctcaattcgtgtttagatttcctgctattaaagacagagtggatagtaacctgcaaatagagttcttaattggtctaaataataaaaagccagagtcagatatagagagaaatgctgagagatcacagagaaggaacaagccaccgccacaccttacctctttagcgtctcagaagaccagagagtgagttcctgtttctccctgcttatatcctgtttccatgcagctacctcacttcctgtctgtctgtacagacctccagacctctatggttagctagtggcaagctccactctctgactcccagacaggctttatttgttcaagtaagatatcaccacagtaaccctttagagggaaggaattgacaaaacagttacctttttttttgtggttctacttgcaaaaggataagctaacacagattttttatcctcatttatgtgttattttaataacgaagagtacctgcatttcccaaatattttaaattcaaacatttttctgtcaccaggctcacaaaattgttctcctcatttcgttttgagtccctcaattgaacgataaatttaatgactttttcaaatgtccataagccacatgtgcctgatattttaaatgccctaaattcaatggcggtgtgtcttagcaagcggtgtgacactgttgacgaagccagctgatgctcgtggatgctgctagagcctccttcattgaaactgtgcctccttgtgttctggatcaactgttggcgttcatttaaaaatgttgtttgtttgaaggctattttttaatttttgtctctgtagctctttgatttggtgtacagagaagagaccctgctgaacgtcatcaaaagcgtcactcgcaatggccgctccatcatcctgaccgcggtcttggctctcatcctggtctacctgttctccatcattggcttccttttcctgaaggatgacttcaccatggaagtggacagactgaaaataaaaacaccagtcccaggtagccactccaccctccaagctccccctaacagttctgacttgtacacaccttgtttgtgggatttcagacacactgaaataggtaaaaattttattttcacccttttaagatgtggtcttgtttaccagtgctgtggtttaagggtgaaatgtcctcctagccccgtgcgtttgaacatctggtccctatgtggtggcactgtttcagctggtggagcctctttggaggaagtggtgagccttgggttggacagtctggccttacttcctgtctgccctctgcctcctgacagctaacacagtgtgaccagctgccttggctgccgccaggtcgggctgtatctctttgaaccattagccaaaataaactgttcattccttcctcaatttgctcgctgttaggtatttgatcctagcaatgattaaagtaataatggaacttctaggagttgagaatttgcaatactgcagcctgtatgctgtcagtgtgggttgggaaatacacatctgcactccatcctacagggtttcctaatgctgaccatattgcaggaggcagcagcggcttcactgtggggaattcctaaattctttctttttgcctcttcttcccatttccccaaagaacagtatccagcacccgagagccaccactcagccattttccacatgcattgctttgtgtttaaaatgataaatgcgatttggaaaccattagggagggagaagtgtgttttggaagacgtgcttagaggctgtggctaaaagaccccactcctcggcgagtgactgctggggccccgcatgatgtttgccactggacacttggacatcacctcgtgttctcgctgagaagccccggcatgaggagctagcctattattttagacttcttatctactctgtttgctttctcacctctagtacacaccctttgctgggttaaattccttagttaacctttcccccaaccctgctttactctgtagaaaccacggttctgtgatgtgctgttttcttggttccactaactactgtttatagagacaggaaatccccaaaagacatgctttctcctcaaaccacagactttaaagcactttaattagtggagacatatgcaatatcctttcttgcctttaacagataattctttctaaattccatttatttatttatttatttatttatttatttaatagtctggaccagtttcccctccctcctcttctctcatcccctcccctatttcctctctcccacccactcctccccgtttctgttcagaaaggggcaggcctcccgtgggtatcgacaaagcatggcagatcaagttgccctaagacgaagcacctccccttgtgtttaggctgggcaaggcaacctggcatgaggtggaggggaaaaatgtgggaagagctgactagaaggtgcttttagaggtcaggtgagacccccacgggaaccccacacacccacaggggtgacagatagttcataactatggaattgacaatgcatagtaaggccttccataagcttatgggacgaggaaacggtgtttagatccattcatcagtgagtcccatgactcacacacgtgacagaaacaccggcttcaccggggacttcaactccacaccaaatatctgtctgcacgttcaggaccgtgggatgttttgttgttacttcaggtgcgttttctagagtttccacaggcattgccagcagctttccattcactgttgtaataataataataataataataataataataataataataataaaaaggccaaagaaaataatttcaacacaaggaaatgatttattttggcagcttttgttttcagttaatgtcacttaggcctatggcaagacagaactctgtggttaggcaaagattcttacccggtgttggctttgaggtggggggtggggtggggtgggggtggttctcaatatcgcttcaacggtgcatccccagtgaccccgccgtcactaggcctcccaaaagatcagataaactcctgagctggtgaccagacactcagtgtatagccctagacggacactgaagatgaagcccatcccagcagggttcaggtgtgtgaagaaggaaaggcctttctatcagtcccccagtgctccactctttctaaactgagatcagagagcctggagttataatcactggctagattagaggcctggccacagttcattcagtattgagaacacgtgagacagagacagaagaagcgctaaagcttccagaacaaacctacacggtaattactgttttctgagttctgtggtaaatattttctgttgtttggggaggaagttggtgctaatttatgaatgcactttctttagaaatagaaaaaaatacaacgtaagaaatgttaaagctgaaatttcaagctctgtctttactgaaaatgtgtaggagccagtctctctctctctctctctccttctctcccttccccccctctcactccctcacacacacacaaacttttgtaaatactatgaaagtgccgaatgtggagacaactacactaccttaagtctgctttccgttgccacaacagattacttaagacatggtagtttataaagaatagaggttcatttagttcatggttcctgctggaggaatctgcttgatgtctgaagaggctgtttttgtgaaagataacaacatagggtaccccaccacgaggagaggcagaccaggctttaaaatgaatccactatagagataaccagtaatccatggtgcgcgttaatccaaccccgaggagagagacgccatgtctcatcacctctcagtactttacagccaggttcagtttcagtgtgtgccttggcggaagtatctggcctacagcagggtctcagtgcatgtcgtctttattcttttcgttttgagcactgtcactcacaaagctgaccatgggtgaaatcattgaggctaacacactcaggtagtgagtgacattggatgcagttcttcaagcaggtgtgaagccatcagaaaccccacagatgggagcaagtggggagttggaaagtcagagcttgacgggcagggcctgggagtgctggggagggcggaagacacatgccttgcaggcatcattggagatttctgagaatgtggatgccacctctggccccaagatctgctgcttagtggataggaagcagccacacaggcctgggcagagcagtgccattgggaagtactaggaaggaaggtcctcctgacaagtagacggtgtttctcgtacctgcccactcctcattcgcatctacccagagtgcagaggttgcccttgtggctttataacctaaggcctccctccactgttccagccaaagctctgattctaaggatctgaaccatccgttgggtgcttggtggaaagttctgggctgggggtttgcatggctcagcctgctctgccctctgctcccctttgatattatagattgcaccttggtgacccctgggctccctgcttcatatctatgttcataagcccggggttccttcagggaaatccttccccaagtaggtacttctttcctgtctaggatccatctccctcctctctcctactctgctaatttgtgttaacctttcctttactcgtccatcagctcccgttacgcctctgcctcttgattcccgtcagttctccaaagcctggagtctgagccatgggagcccagtgtgacacgttgagtactgactgtcatcggggttcactcagaactccgtctccatgacactccttcccaaagctgtcacagcacccgtgtggccacctgggcctccccagcccacccactcttcacatctcctcccaatatcagctcccatttgtaaatctacttcttttggtcctctcagctatgagtcaaactttcaggttcaactttgcttcatacaagtgcaaagattattatctctgcaccatgtgggccagggaaaccagtgggaagccagcagaaagaggggttcctgggggctcggggaaggaaagttagttcccaaacatggttctgaaaaaaagtcttctatcctccggctatttgaagcctttattctctgagtcccttacctcattgtgaggactgcctacccaaggtccttgcttcagccacagggaccagtgacttgagcctgcattgggaggaagctgtcctagcagcccaagtcagaaccctgaatgcatgtggctagagaaatagcagtattcatggtggcttaggtcaacaatatcattagtactttatcacagcccctaaaagaaaacaattagatgattggagctttttgcacattggtgactaatctgtcctctgtaacattgctttaaaacaggcaaacaaacgtgtgctcagagctccaggctaactcaccaaaaggctttaggatgcagcgtggtcaaagcacaaatatctttaaactcggatgcctctgtggttgtctgtctgtcatataatacctgcctctctacagttctctgctctgtgttctcccaggtaatcacggggctcccaccatgaccctaccttccatgatggggacctgtcagaaggagaactgttcacccacgatcccctcttccgacgcaggtgtgtactgacaacccaggtctgtactagcccctctaaggagagtggatcttggcacttcataatgtgttgaaacagagaacaaaaggtaaaggaccgaaataatccaagctagagaaaggattccgcacttgttattctgagctgtcttggttctcacagtgtttctgcttacccaaacctggcagattcagcatgtggaaatgtgctgctcccaaacagcagcccacactaaaggatccgcttctggctacttggctgccaacaaggggtgtgggaaagcaggggttctactctagagacctggctgtaaacctggccttgccactttgctggcttacggtacacaggcttccagaaccatgtttggatagcttataaggacagaaaaatgaatgaacaaaatccctctccccctttcgggagcaagcagatgtctaaaaatagctttagctctaaaccattcccttaagatgtgacagcagtctgggaatatggcatgtatgatgttttataaattatagaaaaaatagtggtgtatttcataaagcagtaaacacgacggattgtgtgtgtgtgtgtgtgtgtgtgtgtgtaggtgagtgtgtgtgagaatgtgtgtgtgtgagtgagtgtgtgtgtgtgtgtgtgtgtgtgagaatgtttgtgtgtgtgtgtgagtgagagtgtgtgagtgagagtgtgtgtgtgagtgtgtgtgtaggtgagtgtgtgtgagtgtgtgtgtgagtgagagtgtgtgtgtgagtgtgtgtgtgagtgagagtgtgtgagtgagagtgtgtgtgtgtgtgagtgtgtgtgtaggtgagtgtgtgagtgtgtgtgtgagtgtgagtgtgtgtgtgtgtgtgtgagtgtgtgtggtgagcgcagggccacattcatgttatgcaagtgctctacccgggagccacccccaccccttgtggactctagatctttgtgtcactctggagctgtcatagctaaggaagcttggagtccattaaatggcaaaatgaactcagagcagatgaaggaagtgacatgaaagacagtggaaggaaggagcgtcaagttaccttgctttcttgagatgttggactgttggtgggagggcacagatggccccctccctgactaaatctccactttgtgacctagagagagaatcaagcgcttgtatttatcccaggcagtgtccaacagtgtgggcacttgagatgttcccagcaaggtttgcctgacccccagtcaaaactcacacaagagccaggtcttctcggcttacatggcatcaccaagtgtccactctctacagtcatattacgtgtgtctgttggtttaaacacctcctatttctcaggcttccccacagatctcagaggaggttctggacttcaaactcctactcaagctgctctcactgtgggtggcgagacctctctaagtcacatcatacatgctctttttaagatttctttttatttcttttaatggtatgtgtgtataagcacctacaggggccagagagtgtcacgcccccttgacctggagttacaggcagctgtgaactctctgccgagagtgagagtgtggtgggagacgactcagatcctctgcaacagcagtgtgtggccttaacccctgagctgtctctcaagctcatctcacgctattgacctggcttccaggtttcactgccctccctttccctaattcatgtgacctgacgtgccacttggccttgcatggctcttgacctaagaatggttctgccgtttctaacttattagagaaagatttaccatacaaaatgggcgtggcccagagaccctgagaagtttcatctggatcctcacagattaaaacagaatccaaccactgctctagatacttccacaggagatctaggaatgttacaaaggaatttcagggcctggaaacactctcagatgctttatgaaattcttcagctacctagaaatttgtcacaaatgggactgggtgggtgtctcaatcagtgaagtatttactgtataagtgagaggttatgagttggattcccaggacacatacacacactcacagacacacacagacacacacacacacacacacacacactcatagacacatactcacacacacacacacactcacagacacacacacacacacatatacacacagacacacactcacagacacactccaaacacacacagacatactccaaacacaaacagacacactccaaacacacacagacacacacatcacacacacatcacacacacagacacatacatacacacacacagataacacacatcacacacacacacacagataacacacacacacacacacagataacacacatcacacacacacacacacacacacacacacacacacacacctgggcattgcacttgtaatctcaaaactggggaggagaggacaggaggatccccagggctcaatggccagccagtctagctaggagcaattgagaaaggcaacaaaggttgacctctggctgccacattcatgggcatgtacatgcaccctatcagttaatttccctctctatctcacacacgcatgctcacacacacacacacacacacacacacacacacacccacacacacacagagagagagagagagagagagagagctcataaataaactatcattcaatttatgtactttctaagttttttttttaattctttgtgaaagccacaccccccccccggtcgtggggcacagtgcctgctcatccccagtataaggacggcttgtgccatccctgctccccccgacagcatcctgtcaaggacccacttgagcatcttctgttagcataaagtcacttgtcagcagttttcagagtctgtctccatcttaagtccctgactacagatgtctctccttttcctaaggacaaatagggactgttcttcacccctgtgcagtgctccccccccccagtctctgtcctttggggtacaacagagctggtagcagtgtgtgggaatcttgtagagaaagctgccacagtagaggagagggctggcagagctgttccggagctggggtgagggtagggcagctttcccggtgaaggttttctcacagccatacctagagacactgagaagccacagcagagccatcgtgcatttgacgttcaagtgttaaaattgatttgattagaatttgggaagtctatggatttgacttttatttttataattgaagttttaattttttacagtaggctgtcactatttagccctggagttatgaaaactcgatatgtagatcagactggccttgaactcaccgaaatccacctgcttctgcctcctgagtgctggaattaaaggcgtgtgccaccaacacccctagtggatttgacctatacattttgcctatgtggataatttcagtaattaaaatgtgtaggtcttatcttcagggccttatttgctctaacttttggcagaatgtgtgcagctacagttatttgattggcaagcctatgagtttgatcttctgtgcttctttaaatgatgtctctgtgtgtttagccacgtaagtagagagaaagctgaagtctggcatttgttgtgcaacacatgtcacttaggcttaaaaatagcttttccctgtctagggctggggtgcagttctaactcgtgagctgtggtgagcatttttgagggccttggtctgctctcttggggccagcaggtgcacatcacagaatacccaggcacacggcacctgtgtaaaagccaggcaatggctggcaggcacagttggccctgggaagactcctggagatgcagatttggtcatttttccatcagccgaggattcacctgacaacttgcaacaaattcaacttgaaaaacactccaaaatgtttgtatttcatttacttcaagcctgctagaacctcaggtgaaaatacctaaatccccaccaaaagtgacttttccagaaaagccaagctttgttaagacaatattaaaagtctaatcatggctactctgtgagtcaatgccatttgcacattcaggagaataaaaagttcacatgtgtttaagcatttaagagaccaattttaatctcctggtatcctcctttaatagaaatggttggtggatagcagagcttgtcaaggtaacacatgctacattttggattcccattgggtatcagtcttttaaaacattttcctaattacaaaaaaaatttaagaacagcatttctctaatgattggattagagtcactaaagtttaagacgagaggacttgagttgccatcagatttccaagtgaatctcagctccgggctgctgtgtccacaaacagcaagtaatttaactaataaagcataaaaaggggacatcaataaatacttacgttcgagcatgtccagtatttttaagatgtattttttatttatgtattttgtgtttgtgtgagtatatgccaagccagaagagggcattggatcccctggggctagagttacaggtgttgtgagccaccccacatgagtgataggaactgaactctggtcctctggaagaccagcaagttctcttaaccactgactttccccagccagtgttcaatgtttttataatatatagactaacattccaagtgaaataatgtcttcagaacctgggggataggtcttttattcctttcctcaaatgaaacttttaatcatcatggattaagaaaaatgtttttctgatggtcagcttaagacagatagataagctcacatcactcaagtgtcagatttgtttcttgtattaaaacaaggccttttcataagatgtaacagccactgtgtgtgggtaattgataacttgtatttactgagcccttatgatgtaccaagcactgtgtgtgtgtgtgtgtgtgtgtgcgcgcgcgcgcgcgcgcgcgcgcgcgtgcgcgcacatgcatgcacaggtatgcccctgccatcccattgtacctgagggaatgtctgctaggcccgactgtgctggccaggcccttcatttgatatttattcagaggccactgccttcaggacacctaggctgctgtgtgtttgctcatctgctgacccactgccttcctcttggggaccataaggttccagtaggctggggcacttatacctctgtctccttttcctcacacaaagcctgtgttgtgtacagataagcttgtctcacaagtgaccacaaggtggcacttccctatgggagccctgaatgacttattgagagtggagtcatgtcaaacagtagacccttttaataagctcatagaccccagtgtgcctgtgtttgtagctcctattgagcaagatgatgggccaatgctggcactgacataacttgggcatcctcctgctactcaatttttatatttcacaaacttacgcaaccctgccaagtcacaactctttgcttagttcttgtcaattgcataatcgtaggcttcattatgacacttccatattggtatttaacgaacttggagcatatttaatcccaattaccctttctcgggtcccatctccttccccccactttcacagtcctaatagttccctaccctttgggctttcatgtcttctaagttatacatatcagacaaaacacaattcttgtctttgtgagtctggttccatccattttcttacaaataacataatgctgttcctgtttatgaatgaacctgttatatatacaaaccacattttctttctctgccggtcccttcatctgtgatgtatacagaatgtttctgtcctttggcttgtccacaggtttctctgtgatgggctgtctttgagtctttggaatctgagccagaaatggcatagttgagtcatgcactggctcaagctttgattgtttgagggacttccatgctcatttccatgcattggcccacattcccacatgtccaccagctgtatgtaagggtcatattcctacacacacacacacacacacacacacacacacacgcccttactaacggttgttggattttttgtttcttgtttttgtgtttgttttgttttggaatcttgatggtagccctctgatatgggtgagaagggacctcagtgtcgttgtgatttgtatttctcttgtggcccgtcatggtggtgacattttgcgtatgcttcttggcagccagtgcattttatttatttcaccgtggctaatcacatggtgtgatgtgtggatttccctaactcctgagacagcttcattccctgccacttccacgtgcccaccgaactggcacacgtgggtcttcagccggcatctgctatgctacaaccaggcagttaccgattaacaagtgcatgtatccagtgtcccacgaaactcgttactcatttgctctgattgaaagcccttcttttgcaaagtggcagtagctgcatcctatgacctccttcctggaacccagagattctctgtaaccatttctttcactctcatgtctttcctttttctgtcaccaccacaaagctgtccccggtccccgttgctccttcctccctcaattccttcagatttccaaatcagaaatctggttcagctccatggtgagcgactacacacggtctgcctgtctccgatgctgggcttgtgtgtgcctgtctctgcatgcagccttccggccagcggtattccaccatgctttcaaaggagcaacctggactcgtgtaaaaatatcagggtctctcttccttaggatataaaataaaatctgttcagaagagagaagccagccttctcctaacgagagatccacggccctgaatcatgcagtgagaccacttgcctgccccacagcctgtggttgcttttacgttcttgccgtgacatgcagactgtagccccaagtccccaaggacagttaactttgtgacaaaatgagccttggcctttctgctcatttagtaatgtaacagaatcctggttctcatacccagctgagcagccatccttgctttaaatggttttatgttttctgtctggatctttcagcaaggggttaagtctcaggacgcttctgacacaatagatcatttctaagcaggatttcatctctagacccaggtggtccctcaaaaaactctcaaacttactccaaataaagacagaatgacagaattgtagctactgtaatcgaaagctcctactatgggcagttctaacacgccttacatggtccttggctaaccctccaactcacagccttctcctcgttctctatgaggctgctgagatcagtgacttgccccaatcccgatggcttccttggcctgacgccttcatctgcaactctttgcagcttgggaggtggagagctgtgttgaccacattctccactacagtcaggcgcatgagttttaaccttgtcacactttacctttctctcctgtcattccccaccaagcccagaaatgcaaaatctcaaggtattatatgtgtagctctacacatgtcagtcccgtgtggtcacgtgtgaagtagatgtcatgtgacttccaaagattgtgtttgcacagtagaagcagactcttgggtgtggatgacagtgtgttctcaaagctctcttgtgtctctgcagctgacgaagggagtgatgatggaatcgagaggacgggataatctctgggactagacacagggcggtgggtctaggtcctatcccaaaggatatgacagactcttaagacctcctatggaaggcctcaccctcccttgaactcactcactctgtagcccaggctggccctgaactcactcactctgtagcccaggatggccctggagatggtgtccctgagtcagcctccctatgcacacaggcctggcttctttcttgttgccttccttaccagtatttacggtatgacttacattttttttttttttttcagggcaacagtgccatttgcttttaaaatgttagggtggctgtaagaccagttaattgcacagtgaaatcacacaggatcagaggtgaactaaaagcctatggatatcagttgggctccagtctgagctgcacattttgtcacagcagccagatcacggccacaaactccataggagcccattgttaaatagaacacagcggcaagccgcgggggtctacagagtccccaggagcaaggactcactctgtttctgctttggaagaagagcctctgttatttaccatgatgagtgcgaagcatggatgggttctaacagaattttatacattaaaacggcaaagcgagagcatttctcagtaactgtaaatgttgaatcaccaggctagaagcatacactgttttcttctgctgctggtctgttagataacatctagtcatctttctaataagctcagctcgaatataaacagccggatcccatggtctctggggtgagttttaacattgcagaccacacaggtattcatgagctgtgtgtaacttgacctcttcagaacaaggacagaacctactgcagaagttgagaaatcaccaggtttccctcagctggccctgggattgtgcttgactcccttttgcttggtgtctgggagagacctgcatgatagttttttctcactgatgtgacaaggtgcccagcaaaatcaaattaaggaaagatgggctcattttggctcacagttctgtggggttattccatcatcctgggagagaggcaacttcagttagagacagtggtggaaggctgggaagccagctggccacgtggcttccccccctcaggaagcagagtgagcaaggacaggatctggtctccaaggcctcaaggcccaccccctggtagctcacctcctgtggtgaggccacacagcctcctcagacagcacctctggatggggacaaatggtgtgaacccgtggagacatttcacatctgtcactagtgaaacacacaagaaagtgttttcctgttgggtgaaaatgtgtcagccccagagaaatggaggaattctgagagtaggcttcaggcattcccttggttggagggaaaataagggcagagagagaggtttctcttctctaaccagggcgactgtttgtgctcactcagaggacacctcttgctttatgccagacagtgtgctaacgtgacagccatgaagtgagtgtgcattccatgtgtgtttcacacttcggttgcaggagcccttgttcgccgcccgggtggtttatgacctcctcttcttcttcattgtcatcatcatcgttcttaacctgatcttcggtgtgatcattgacacctttgctgacctcagaagtgagaagcagaagaaggaagaaattctcaagacaacctgcttcatctgcggtaggtgcccctccaccctgtgttatgacgagagatgggtaaatcacccctaagataacggattgacaaactgcttagcaggaaggaggggtgagaatcatttccagttttcaggttttaggggaaattattttagtgtgaaggctggacaacattcaggttacgtaatgccacgtgagactgacactctctgcttccataaatagatgcaagaatcacccccaaactcccctgccattatttctgcaatttgtacagtcctctgactgtagagtgtgctgccagatgccaggaggttccaccaactggcagatgggtttttaatcacaatagcatattgagtgtattacagagtgactttttattttgctagattacgaatcacaagtttccactcattggcatcactatcttagattcaaaaccaggcattgtcccagtgttaaagctatacacatatacataatatgtatatcacagaccatacaactgctatagaacatgccccatacacatacatcatacacctgccataccccatgcaccggcagcacatgcaacataccacaggctgcgcgtgcgcgcacacacacacacacactcactcacacacacacacacacacacacattctccacatgtgcacacacacacacacacacacacacactcactcacacacacacacacacacacacattctccacatgtgcacacacacacacacacacacacacacacacacacacacacactctcacacacacacactctgcacatgtgtgcacacacacacccttttcttctgcatcattgcttacactgaaccaactttcccttcactgttatgataaatctttctgccaaaagctgcctgagttctatcgccatgtgggcagtctctgccagccacctaagttctgcctgccgtgtgaatggacaaaataatacacagacttgtattaggtacaaatgcttcttggccgatgactaggattctcaactgttagctcagtcttaattatcataaatctatatattttataagccttatcttatcggacgccttccattggtgtccctccttgccggtggatcacattgtgccgctggaggaagagcggaggggaaaagggacctttctgtttctccttgctcaaatatgagtctccttgctatgtcacttcctgcctggatcaccacttcttactacacttcccagaatcctcttcgactcctagtcccatgtaagttgctgcctcactgaccaaacagtattttatttatcatccggcaaggcaaacacatacacagaagcacttcccccatcacttcacagtcatcttctctcaaaccctcccccttctctatccatcagccctctctggcttcacttgccaccgtggtctctactctgaaccccagtgccacacttacccctctgctgtcctttggtcttcaccacagtgtcagaccatctgacttaaactgggcttctgtgcagcctgttctgtgcctgccgaggcttttcgcacttgtctcattctccttggtggctcctccaagctgtttcatcattcctccagctggaggtgtgcctggaaagaatgcgtgataatacacaagctctggggaaaatgtccatcagctgtgacctgcctgagcattcatgatgtgtgcacagacagacagacagacagacagacacacacacacacacacacacacacacacacacacacacacacacacacagatctcttatgtatcaagggaagtaacagagacctttctgggttactgaaggtgctaagaggacagacacctctgcagtcagggcggggagcagtaacagccaacatgtttccctggacacatggcacagaggtggtgatcagggacaaagggcatcagttagttgctgaagtgggtggagcaaaacagccaggaccagaggtggcacagaaacagtatgggcacagcctggggctcgctttgagtgtcgctgtaaccagacactgcagcttactggatgagaggtctattcgggttctggtttgaaggtttggaccaccatgacagggcagggacggcagtgagagcacctctcagctctggctgtagggatgtgaggctgcttgttcacatgctagctggtcaggaaatggagatgagctacacacctcaaggcctgctgtactcgtgcctggtcctccagataggcccacttccccaagttctcagacccctaaccagctgggttctgagcactaaagcatgtgccttagtgctgtaggactttcctacagacaccatagcagagggacaaggtgttgtcggtgtgagcctcagagtcttactgtaggtggaaaagctctgagtctagcttttgtttgagagcattgcagtagctctggggagtccttcatcaggggattgacctgaaggcagagtaactggttagtaccacagcccagatgacaagtaaggaagatcagtgatagcctgtggtgcagtgttaggggtgcaaggccgagtcaagaaagttaggtgatagaatcttaaaatctttttatttatttatttatttatttatttatttatttacttatttattatgcatacagtattctgtctgcatgtatccctgcaggccagaagagggcatcagatctcatgacggatggttgtgagccaccatgtggttgctgggaattgaactcaagacctctggaagagcagtcagtgctcttaacctctgagccatctctccagcccagaatcttaaaatctttttaaaatgtggatttgtttttatttatgcacattcctgattagcttgtatatatgtatgtgcaccagaggccagagttgtgggcaactgtgagccactatggaggtgctgggaaccagacccaggtcctctgtaagaccagcaagtgctcttaatcatggagccttctctccagctccagaactttgaagtgctgatgtttgggaatgagatgagaaatgactgggtgcatgggtgatacaaagaggctgagtatggggaggtgaggcatgaatacccagaatttacctcagggaagtgcgggacttgagagtctgtagacagtggcagtcagcccccagcccacagattacagcaaaatctggagcatgaaggacaactgcttggtggggcaagtggtgtgtaagcaggaagcagcacccaccaagggtcaggagagagagaacatgggtggaaagttcgcgaggagactggaggacacggcagagacatctgagaatgtgtgcgcacattccacactgctggctccagcatggtgggctgcgctgttgctgctgaggccagcgggcctgtctcagggagggctcagcacgccacttctggcccctggatccacatcagtacatggtgatatcctgagcagccctttggtgttcctcctggagggtgacccagattggagcaattccagaaaaggagtggacgagccaagccgtgcaaagacaagaaccttgtgggagtccctctttgggtggctgtgggcagatccaggtggaggatgatctcctgagcctggtgtcatgatgccaagaatgatgtgtctgtgagctaagatgaaaatgcttcaggggttcctcaggtcctgtgcattatgacagactccccaagtcttcactttataaaggtggcacaattgttgacaaaagcatctagaagagagcttgcttctgccactcaacatgaagagaagcaagagctctgagatctgcattgtttctgtgtcttcatggctcgtgatattgcctctcttcttcttcctccctccccctttctcatattcatctatgcatgtgtacatatatgtaagcacacacacacacacacacacacacacacacacacacacacgtataatttgtgaccaaatgccggagcaaggcaaacaaaaccaataacatgaatggaagaccctgtcctttggtttgtcacttgggaagaccctgtcctttggtttgtcacttaggaagaccctgtcctttggtttgtcatttgggaagatcctgtcctttggctttgtcacttgggaagacacttgtcctttggtttgtcacttgggaagacacttgtcctttggtttgtcacttgggaagaaccttgcccttcagtttgtcacttgggaagacacttgtcctttggtttgtcacttgggaagaccctgtcctttggtttgtcacttgggaagaccctgtcctttggtttgtcacttgggaagaaccttgccctggggtttgtcacttaggaagaaccttgcccttcggtttgtcccttgggaagaaccttgcccttcggtttgtcacttgggatgctttggtggtttacagagcaggctgctcagtgcagagctcagatttgctagaagagagctgaggccaaataacaatctgttgtccatgtctaactggatgaaggaaaatgaggttggggtgatacagccaaagagatgtcctgtgaccactcaggggtatggagaagaaacacgtctggacacctgaaggaatgcttctttcatcctgggagagaactagacccgtgcattttggaggaaagaaagaaaaacaaaatcaaagtcctctaatttctcttctttatgggacacccatcactgttttcacttttcacagtaaattgtttgaatattgccgtccaaaggacagtcctctttgtctgtgtctttggctcccagtgatgtcccattcctttatactagctctctagagaaaagagctctctagaaaagaggttttgatttttgccttgacccccatccccgacactgtctcactatacttttctcccatccatccccgacactgtctcactacacttttctcccatccccgacactgtcgtctcactacacttttctcccatacccatacctcgcttttgccgagtacacatcaccagcaccacactccccaggcttcattttctatttcatgtttactagactgaagctggcacagcctcctggcagccacgtggacccagcccaaacccagtgccctctcttctctgccttcctctgctcagctccagatcctggctggcatatggtagccacagacatgtgtctctgccttcggtgagcagggctggaagctccccctcacatcagtatctctgctgtctccttccaacacttcagcctccctgggccgacagatctgcctccacaggttcttactacaccctgtcacaaattctcgaagccacacatgggccggctcagtgctgctagactaactttcctagtacaaaagccctcagtaacatggtgccatccattgctgtaaactcctaattttcctggcaataagacactttacaatctagacccatctccctcctcctctccctcttctctctcttcttcttcccccttcctcttcccattctttagtgtattttcatccaatttatgtttcaaatccagtccaagtgcattccctgtcgttctcatcctggactctgtattcacagtagtgagagaatgttctggttgaaataccaaacccctgtgagccatagcactcaccccgtctctgagacccaaccccaatactagattcatgaacccttttgcaggctcactcggcaggataagcatgggtgctcctgaatggctgtcatcacgccatgctcagtgacatctgtttgcttcttcttgacggcatgcaccctcttactgtagaaagcatgtgaacctcttagacaggcagacacagccttccacagtcccatggcctgatgatgtagccttggccaaccttctttccctgagcttctctttgctgctctggaatgaggagagtctgcagccaggctttgaggctgtggtagctgtaatcgagatcttgtttataaaattctctactattgtgcagaggtgaagctaactgtgcttcttcaggagaggtagacccatagacgtattaaccgtttttattctcccgtgtttgatgtggggctcattcatcagtgtttgttaatgaatgacagtaaatcaacatgacattgctcgtcaggtacgcaaggaagggaagaaagatcaatactgagttgatctgtacttcatatcaaaacctagatgcagactggggagatagttcagtgaagtgctggccatcaagcatgaatgcctgagctcagacgttcacacccacatgggaagctgggcacggcggtgtgagcctgtggcacgctggccatccagatgtccgcactcacatcgaaaacatgagcctgtgaactttaggaggtggggcaggcttactggtgctcactggctgtccatgtagtactcaagcaaagtgagaagtgcttgagaaaatgctcaacatccccccctggcctcgacatgcatgtgtgcacataagcatgtatgtagcacacgagtacacagacaaaacctgactctgactatagatggctccaaattttgccacaaacttggtattgtctcagtgacatgacacgccaaggcacggatgacatatccagaggctcagggtgatgctatgtcaatcaagtctatattgatttttctggaagcttcatgcttattcaaaagactgaggggctgtttggtaacctaagctcagagtaaatctaaacaaaatttttgtattataatcaatagaatatcgtgaagtagagcaaatttgtgtgcatatctgaaatgaaattgaaactttgaaaaaatgtgggctggggatctatagttgagcatttgcccaccatatgtgaagaaccaagtttgatttccttttaccaaaagaaaataatgtaaactggggacagagagctgtctcagcagtaaagaacacacgctaagcatagcttagctaagtagaagactagactttggttcccagcatccatgtgggtggcttccaaccacctgtagctccagctccagtgctctcatgcctcttgtggcctttgtgagcatctgcacacatgtgtgtatatacaccaacaccacacacacacacacacacacacacacacacacacaaagaggcctggataacaggttagctccatggtaaagagaagtgctgtggtgggtgttaccagaaactcaaggcagagaataaaagtcactcttgatttctcttattctcctagtccaagtagattttatgccctctcgggttttcactctgaaatgtttcttcagtcttctccatcatttattcagttcttccatcaagtttagttgaattcctgtggttgtctgggtaatctgtagggggcattcaaaatctaagcagacaggggatcagccatctggttgtgtctgtgggagccggtggcgccaaaggctgagctgggtcttggagaagaagcacctgcaaggtggaagagaggcagctggagacaagagtctttctgagaacatggagaatttggagggtggaagaaaggtccacgaagaggtcagcacaggagtctgagagtggcttcaagtgccagcccatgggacatcctgattgttatcagaagtggaaaggggggcagagaaacaacttttcagtgagctaagttggataagcccaggagctagccctgtggagttctctagccagctgctagatatggaagtgaacttggtaatgaaggtcagtcttggaggtaatgttccaggaaccaccagcgtggtgatggttatctttggaagtgaatgccgcactccagagagcaagagcctatgagcatgaagtcaacatgacccccaacttatccattctcctccattgtcctggctccttgccctctccatcagtctcccctaccatcccccaaagttctgccccaagaactacttcaagtatagttctgaagctgctgtttccacccacgagtccacagcacaaaggggaaatgccatagatttcagtttgagcaccacagtagacgggtgaccttttctacaccaggccacccacattcgtctctagctttgccacctcgaggcctttgcccatgtggacctttagagtcaggagtggctctgttcaatgctgactgattcttcacctaactacaggggttagcttgaaccgttctggatctgtttcttggtgtggataaacgtcatgtcggatggtagggtttttagacagctttgtggtcgccagcagaaataggtgctcaataaaacccaggtagaatttacgagcatgtacctctcttccgcttgctgaagtcatcttctgagagtctgtaaagctgtctgcctcctcgaagccgtttgtcatcttgtccgctatgctcccttgcccacacaagctgcttcagagcattgcacgttacctggtcccgctaccacgttctagggtgagtgatgatggaatcagtactttaatactctattactttgcagacaggggagaggcttgaatttaattctggggaatcttactttaatactcttctttttaatcaatagctctattgtgatgtccttaaaactcaccaacttaaggcctacagtgcagtgcctttaacgtattcagaactgggcacacaactttatgatccatttcaggacatatttactgccccttcccataacactcatccatcatgttctcagcagcctcccatcaccctgtgccctggccgaccgctgatctgctctctgcatctgtaccttttcctgttttgaagattcagttaagatatctggtctttatcactagcttgatgcttgcaaggctcctgtctgtgctggtcactttccccatggctgacagactatctgactgagcaacatgcagggggaagggttcccttaggctcacagttcaggagatacagtccctcgtggcagtacggtatggcagtgggccagctcctgggagtccatggtggctgtgggaggtgtcgtgctcacatctcagtagactgagaagagaaggtgaatgtcagtgctcacctgcttcccctccccccttcactcattccagttctctagcccataggatggcacctctcacattcgggctgttccttccttcctcagttaactctccctggaggcaaccccacaacacgcacgtgtgtgtgtgtgtgtgtgtgtgtgtgtgtgtgtgtgtgttttatgtgccctatatgagaaccatatatatggtcatcagaggccagaagagggcatcagatccactggacctggaagtacaggccgtcggaagctgccatatggtcctctgcaagagccctgaatgctcttaaccactaagatatctttccagctcccccagttttttttattaattcagattgaaaatcaaaattagccctcatgctgcataatacctcacgtaagtgcttccagcctttctattgagcagagtgttctatcggatgctgagaccgatatcagaagtcttctttctgctcctcacgggtgggcattgggtttttttttcaactttggggttgcaggaactgtgttgcagtgacaatccttgagcagggtgctgtgtgtatgtacattctcccttcatgggcacctgggcatgatctccttagtcatgcggtgactgtgagaattctttagaaatggcttgttttgcaaagctgctgccctgttttacatttcttttagtagcctgagggcccagtatttccagaccctcccagcactgtcatcatctgctttcaactttagtggaagtacattttactactgagtgctcttaactcatccaatctcggtttcattgaatgtcaactgtgtgtcagacacagttgtaaagtcttagggccatggtgaagagcagaggcacaggtatctgtagtcgggaaagcatgtgagtaataaatattaggccaggcttggtcgaacacgcctataagcccggcaatcaggaaactgatgcattaagatcctattactgaagccagccttttttttttttacatagcaagttccaatccagccagggctaaataatgagacactgtctcaaaaacagaataagacaaggaaggagtgagtatagatgtgtgtgcacggattcgtgggggagcacatttcttcctccatgctggcccgcagcaggctctccctcgaaggcgtggctactctgttacctatgagtcgaattgggatccagtgtaatttagcaatttccacactgctattgtcagtgtgatagaaagtggtgaactaggaaaggagaggcatagtgacagatggcccagagtgccaggaaatgacaagggactgtgtgtgtgcaggacactgtgtcaccaatggggagggactgtgtgtgtgtaggacactgtgtcaccaatggggagggactgtgtgtgtgcaggacactgtgtcaccaatggggagggactgtgtgtgtgtaggacactgtgtcaccaatggggagggactgtgtgtgtgtaggacactgtgtcaccaatggggagggactgtgtgtgtgtaggacactgtgtcaccaatggggagggactgtgtgtgtgggacactgtcaccaatgcggagggactgtgtgtgctggacaccgtgtcaccaatggggagggactgtgtgtgtgcaggacactgtgtcaccaatggggagggactgtgtgtgggggggacactgtgtcaccctaagtcacctgccaatcagagttcaccagaaacatccatgaatgagttagccaaggacacagcagcgaatgagttctgtggccagaggaaatgcctagcctcggcccctgatggaggaatctgtctgtggaatagcagaggccagcatggctgcttatacaccagcagggggaggtgaggaggtgaggtcagagcagcagtggagccaggccacgtgggagttagcacctaaacgttacatgagacacagacagactaaataactataccttgtgtttagtttcctcttctctgtaattggacacctggcatactcctatgtaaggaggaggggtttgcttgggcttctactccagaaaagacaatagacctcatggcaggcaggacattttcagggacctgtccnnnnnnnnnnnnnnnnnnnnnnnnnnnnnnnnnnnnnnnnnnnnnnnnnnnnnnnnnnnnnnnnnnnnnnnnnnnnnnnnnnnnnnnnnnnnnnnnnnnnnnnnnnnnnnnnnnnnnnnnnnnnnnnnnnnnnnnnnnnnnnnnnnnnnnnnnnnnnnnnnnnnnnnnnnnnnnnnnnnnnnnnnnnnnnnnnnnnnnnnnnnnnnnnnnnnnnnnnnnnnnnnnnnnnnnnnnnnnnnnnntgggacctgtcctgcctgtgtgggtgggtggggggggctgctgactcacaccttagtagataaggaagcagaacacagaaggctggcacttagctgccttcttccatcctgatgcagtccttttagtctggcctgtgggatggtttctcctacattcaaaggaggttttctcctatcagttggctgtctctggaaacagcctcatggacacaacccaacctattccctaggcatcacttactccaatcaaaaattctggagctggagagagaattcagtggccaaggtttcaagcctgagacctgagttcagaactcagcatccacatgaaacgcctggcaccgctacaggcagggttgttaacccctgcctcatggagacggagacatgagcaactctgagttgctagctgtcagtgtgtctccagcttcagtatgagaacctgcctcaagtgagtaggtcagagagagccagagtaggagtcccataccctgcccgcccccacacactatctccaccatctatatggaattcagctgtcactggacgtctaaatcttaacatctgtgttttatctaatactgtgtaagccctctctaccggctgttgtgaggggctgctgtgagggccacagccaagcagagcctccacattgtgaggttttccaggagtgactccagctcccctgctgggagtagagggcacaggtggacacaggcagcctgggccgataatgagatgatccacacacacaccggaaggcaatagctcagagcacagcctcagcagaggaggcccttcaacacagacagacgcatgtggatatgtgctgaagaagaaatagaggaatttcaacgtggatggggtatggcgtgtgagaagcagagaaaagccaaggatgactcctgggataatgacttggacaacaacactggagtagccactatataaccagagggaggctgtggtgggaacacattggagctcatgtccgacacgatgaactgataatgggtcaagtgaaatgaggtaccatcaccagatggctgtattttatacagcattttcataaaaaaaaatccaataacaacttcaaaagtcaacccatcactggggacagatattcttaaatgtatttgttttgtaacatgcttaaagaaaggtttcttcatgacctttgaaatgtgcacagggaaggagtagtcaggactggaactcagtttcctggcgtctcctctactatctgaacagcaaagatgaactcaaccctgacatcccgtctcccacaccagtaagagttgttttcccatggatgtttctcttcctctccattcactgtcttcataagctcctcgcttgaagagaaaagcctgaccactcaaatcctcccataagaaggccagtaagcatcagctcctgtctccaggtcccagccctgcttgcgttcctgcctcgacttccttcatggatagtctatgaattgggagtgtgagccaaacaaactctttccttccagtttgctcctcgtcgtggtgcctcatggaagcaatagggttactaaacaggacataaattgtgccaggatggtggggtgttgctgtgacagacctggccttgtgttttggggaggatcgtggaaggagtttggaattttaggctagaaaagccattgagtgttgagagctcagtgggctgttctgtaggagcttggaagacaagaatgttgaagtcattgtggatggtggaaggctggcttgtgaagtttcagggggaggtttaaaggctatcagagccatttgttattcggacttaagatgtggttctagtcagctggggctgaagaattagttgcgattaacaagagactagcgccattgacgtgaaacctttgctgggacaactgatgctggttaggtggagctgagacaataagcggcatcattgaggaagtgaaatcttgaggaagtgtttcagagagcacacagaaggttgtacttggtaatggaagtgtcacccaggtgttactggttctgaaggcatgaagggggcgtggaggagcagctgaggcttggctgtgggaaagcccagaagtgttgcaggtgaccctgctcagacacccgttgggggagggggtgagaagacgcagcaccaaggactcaggcactgggagtcagtgagtggcagactcatttattcaggaaggtaggcctgcctttatacccactcccaaggttctgtttgctcagcggctgactctgctgcgttgtccttttctcattggtgtctctggtcaggtgtctcttcgtcagtagtctctgggcattgaggcaggcttggcagtttggttcagggaggaagtgcctgccgcgcatgctcgtgtgggctggcctgggcacctgaggcagggtgactggggcttgggtaggccggccgcagtttctcctacaccgaagaagccattggtgaaggtgcagcctcagtagcagtggcagccctaggattaaagcggtcatgaagagaagccgaggcttgtcaccatgaagagaccccaggaaagggtattggtgggagtgcagcccaggtgcagcgggaagtcccaggcgtttggagatgccagtgctgtgaggtgaccatcaaggacagcagccgcagtggagtggagcctggctcagcttagagtatgagctgtgtgtgcagctcagtgtggtgctggaggagcgacccaagccccttgaaggagcccagaagataataaagaatccagacattgaacgttgagttgtttacgctgttggagcttggttttgctttgatctgattttaactgtgctctgactcttccctcttgaagtaagaatttattatttaacttattttcttattttataggacccacagtttagagacttttgattttaaaagagacttggggtcttttaaagaggaggaactgttttttgagtttgtaaggctgtgggacttttaagtttgtaaaatgttttacaatgtgatgtttatattaaatgtgtgatcttggggatgaacaagaaaggaaaggttgtgactttacagtgatgtttttgtgttgacaagggattgattgggctgtaaagttttatttcaatttgacacaagctagagtcatcagaggggagggaacctcaattaaggaaatgcctccgtaagatggggctgtaggcaagtctgtaaggcattttcttaattagtgactgaagtagggaggcccagcccattgtgggtggtgccatccctgggccgatagtcctggggtcttcaagaaagcaggctgagcaagccataagaagcaagccagtaagcagcaccctccatggcctctgtatcaatgagctcctgcctccaggttcctgccctgactccttcagtgatgactggtgtggaagtgtgagccaaatgaacccttctccccagcttacttttggccatggtgcttcatcacagtagtagtacccctgactaggacacctgagaattgaagtggccacccaagccccagcttccctgagtgtcatggaccaggggccctgaggagagtccttacccctgcacagtgtgctcagggctgtctctggttgcaagtgactgaaggcacgactcagatgctttcctttaacccaaggccttgatggaaaggaatctctttttttattcctgccacaattagccagcattccttttatttgttgttttctttctgaaatccttattgtgcctgtgagtgtgtatgagtgtgtgagtgtgcgcgagcatcagcctgtgtgagcgccacagcacatacatgtgggggtcagaggacaactttggagtcacttcttgccttccaccttgttttgaggcagggtctctcttgcgtttctgatgcctgtgagcttccaggcatatctccggtctctgcttcccaccgtgcagtaggaatgttagggttacaggtgtgctctgctgaacaggaccttctgtgaactccagtaatcaaatgcagattacctggcttctgtggcaaatgctttccttttcttgaacaattatcattgtctctttccgcttatgcttttggcctggttgagtttgatagttttatatggtctacatttaagatcacctgcaattctgacctctgtaatagaactgcacactcccaaggatcacggggaggaaaatacatgttagttgggaatgagtctataaaccacagcctcttttatctagagcttttctgtattgttgtttctaattgtaacagtattttaaagaggcacactcttccagaaagcaggtttgttgttgattttttaataatggtcatttttattatgtgaagaagtcatgattaacagaaaaattgcatacagtgtttcctgtgttttgcaggcctggagagggacaaatttgacaacaagacagtctccttcgaagaacacattaaatcagagcacaacatgtggcattacttgtacttcatcgtcctggtgaaggtgaaggacccgacagaatacacagggcctgagagctacgtggctcagatgatcacggtgagtaaggctgcctcagccagtcctgattctctaactgtgaccgtatcagaggccttcagtgtccatctctcccctgccttcctcttaggtgagagatgttctagctctggcttttttgtgagactttacataggcttgtcagttactggataattttgacattgctgacatcatccttgttatccatcaaatctgtgtctccagtgaacagataacatgttttcagggattatctgtgtagtgaagagtttcctactaaagtctctaacctctggccccaaacctccagtcatcactggacctctcagttctcaaatctggaagtttcatattgtcacatgcaaacaaaagtcatgcttcaaaagagtccttgaatttccaaaatcaataattgaaaacatcttgtgtggggttttggatgttctaggggagcctggtgggagaatgccactttctggttttagagaacagctgacccttctgttcagtcctaagaatggtacttgtgtgggggagtgaggtgaggagatcaaggtgaggagagggaactaagaagaggggttaaggagagtcagtaaggtaaggaaagtggctttgacctgaccctgaaggagcaggtcacctatttagataaacaaagacacagtactggccacagcctgcttacccatccatccatccatccattcatccatcatccatccatccatccagccttcatccacccatccatccatctgggcattgtcttattaacagtgtgggttgacacagtgttgacgtgcttgtgtgtctccagaacactttgtataaagagcttccgtaccttggcatctttcaggcattctcattcctgatttctgattatggctgctttctctgcatccttcctttgagatggacagaatctagtagtttgtctgtccctcacatttatctctctctcctcttttctaaatgtgggggaaaggtaatgagtcccctgagggactctgtcatggctgtggccacacattctggacagtgtttgtgggaaacatttcccagctgctcatcaggagaagggcatctgagatgcagaacttacagaatgtgacctcacggctgtaaatggaataactgtgtttatctggctcccctcaagtcttttgtataaaatatttctgggaatacagaatacgcccccttctgtagaactcaattgtgggggaacaaccagctggaagtgggtataccaggtgtgcccagtcatgtgatgagaatccaaagaggctgaaagtcagagtggtgctcggtgtggaaaggtatgtcagggtgtctgtgtggcctggggggtaatggacaaggcaggacttgtgcagtgaggtttgtctgctggatcagagtgagttcctgtgagaaacagccaaacacaggctggcagtaagtcactcagaccttcagaggtgttagttagctttcatggtcagtgtgacaaacacacacctgtcaggcctcaaaggaagaaaggtgtgtgtgtgtgtgtgtgtgtgtgtgtgtgtgtgtgtgtgttagcacgcatactcttgaggtggggagttgtagttgtgcctgcatacacctacatatgtggaagccagaaattgacatcatgtatatgtctctatcgttatcactttctaccttatatttgttctgagatagtcgctcttcaaatctcgatgtgatagtttgaatgagagtgactcccacaggcttgtatattttcatacttgatctgcacttggtggaaatgtctgtgaaggattgggaggtatagccttgtggaggaggtgtctggctgggggtggcttagaggtttcaaaagcctttgacattcccggttagctctccctgccttgtgcttgtggatcaatatgtaagctcttagctatggctccagctccatgcctgcctgcttccatgctctctaccacaaaggccatggcctctaaccctctggaaccataagccaaataaactctttcttctataagttacctttgtcatggtgccttattacagcaaacataattatgacactggagtttaccatttcagctaaactggctgctcagtgagctccaaggatccatttatctccaccacacccctacccagcactggagttgcaggcacacatgctaccatgccaaggatccaaacctagtccctgctcttgcaaacagcaagcacttttcccactgagctgttacctggcactgaaagagtcattttgctcatggttccacaggttcagcgcacaaccacctagctctgcattcagggcccagtataaggcaaggtatcacaacagcgggagactcttcacctaatggccagcaggaagcagaaatgcccacaacttggtggataggaagcagagtggagccggaacgggaaggggcaagggcaagatggaggctctagggacatgcccttccccagtgaggcctcacctcccagtagctcagtgtgatagcaagttcaccagtggatcgatcactcactgggttgcagccatggtggtctgattgtctccagccaggtcctcatcttcacacatgtcattcccacatggtgccctaatgacctctcaggtgctgacccatccaatagaatggacaattgaggccggtcagatactcagggcctccttagtggcccagtttcactgctcgtaggagactcacttggaggaatttctgagagatggcagaaaaagctcagttgaaattctaagtagtacatgtcagcgtctgagcatgatttcactagcaacagaaatccactgaaggtcactgcccagagagcagtgtggcctgggatggtgtcaggaggtggggtgcaagcttctgggaaaaggaaaagatagcaccactgatggcatttaacagtgagtgagacagaggtgacggtggggaaggagggctggacaaacctggcacaacaacctaggctaggcatgcagacgagaaagatggtgtcattgggataggacctctgtcaggaggagaagccgtttggggaagagaccagggtctgaagtgagattggaaattgagaatagtgaattttggggacagtgaaatgggaggaacctcatctctgctgcagggtcctggggattgtaggtgagtcctggacccatctcttaccctcacctaatgtggagagactgctgtgttctccctgacagacaggagtgtgtatgttcagggtcatggccgcactgaaagcaggggattggtgaattcactagacccaagataaatgataaatgggtgttttattggggaacaacttacacagataagagtaaagaacagtgggtgttcctgttccttccgatgccagccagggagcctgacctgctgcactcctctaccttctggtcatgtccacacctgaagccacacccaaaggggtgtggtgattaacacaaattcactgacagggctagatgttactacacagcactgcctggtacagtgcctgcattgttgctcttaatggtcttgtcgctgtgtaatccaggttgtcctggaactcccaattatccagccttcatcttcctaatgcgggtgtataggtgcagccaccattcctggcaagtgtagggacttacatagttctcactgggacagcatctgagccagtaggctagcaaggtgagcagaggaaggcaatgcaaagagagggggagaggccaagtcacagctgggaacctgcttaggaaactgaaggcagacagacacaccacagataaataggacaagaaggcaggaggctccaggggctgaaaatgtcaagttaacagccacaagaagcgtcaggtgtgagctctgggctccatgagatggaaatctcttcctgcaaagaaaactacagtgaagatatgaaaccatcttcagacctgacatccgagcagcattttatcaggcaatccctttgagtgtctaagtgtcacagttcttattgaggtcctgccctgcccacctatgtcagagcccttttccagaaaagcccaggagagataagagtctacaagtttaggctagcaggaaaagtctcgttcttgtcctagctatatgtctctagaaccaagtttctttcctgaattattttaatcagcagaaaagggagaggcatattagctcaagtttgatgcaaataagacagttcaggtggaagattgctgattccagcaaagcaaaagcctgtatgttacacacccaattcggaaactttctcactccaggctttgtgggtgtatggctgtgtggtcctgattctccaacagagattttagcacatacaattccacattctggagtttagaatcagacagcacgtttgtgcttctgtgtccaaccagtgacagaaatctttgtaaaatattagtgtccctaactctggaaacaggcttcttactaaacagtgcatggatatttgaatcagcacagagcagaccagtctgggagatggttagagagggtgtttgtatctccaagctaaatgtgcacgttttctcctggcgagcaaacttttgcctgtggtaagaggattggcgtcactgggaactgagaatgagaatgagaagggagcacccaggaaagtcggagggggggggggggggggggggagaagcaggtgaacacggaggagctcctggctttttcctggcaaaacttcgagcaccacaaagcctgtttgcttttcctgtcatcccaaagatgacatctaaggagcagcaaaccgaacagagatcattggagaaagtgtacaagatttttagccaacaacttggagacattctcaggtacccatgttatctgcggagatgtattgggggctttggtgatatttgctacttaatttgacaaaaggctcacaccaaaccagagctgcacataagaggaggtccctgtgtattcaggggatggctgatcctggttgtccctgggatcccttagctacctgtccatgaccatgacttttaggggccacccctgacagattattacacctctacatacctctgttcattcaacctttaacaactacttcctgatgtctgcagtattgacaaagacagtttaattcatattttttggtagcacaatagtctctcttcacacacacacactaatattattgaaggccttagtagggtattgctggctcttcgctctgcacacagcctgggcaactgatatctgaaataggtcagaagcaattcagtagacacgggttatccccaacatgctcgggactatgctaaaagtttgatgtttacagctaaataagaagttatccaccaggtgttggtgtcgcacgcctttaatcccatctctcgggaggcagagacaggcggatctctgtgagttcgaggccagcctggtctccagagtgagtgccaggataggctccaaagctacacagagaaaccctgtctcaaaacaaacaaacaaacaaacaaacaaaagttatcgcttccttgaggaagcttaaaacattcactgaatgaataagtaaaacaaaaagtgaattaatgagtgattaatttccttctagctcttctagccttctggcaactggacataatttgtagaaccatgcaccaaatcaagctgctccaagaggttgacatttgaatttctcatcaagaaagcaggcttttcctttctataaaaccaaaaggtgacagggtgctgtcaccacaccatcagaccagcgctttcatttactgtggcctgcccctggcacgctgcagcccagctcccccatcccacacaggaggaacaaggaacatggaagagaataggtgaggctttcagtttaactcagcctcaagaatgggtcctgtctggaagctatctgctatgaccagagaaagagagtttttttagtttcccactgctgtgataaaatgcttgaagagcagctcgagagagggagggttcgtttgcgtccatggttcagggaccagcaataggcatgtgggggcaggaatcgggaggaagtgaaggcaaacacgtgtgctggcaccccctttctctctgcattcagtctggaacctcctgccctgaggtggtgactctcacactcagggtgggtcttcctttcccagataaatccctctggaaatgccctcataggcacacccagtgtgtgtcttctgggcaattctaagtccagtcatgctgaacatgaaaatgtgtgatcacgggtggcttcatctttctcatgagacaaaaagaaagctaatcactcacctgctgtagccacacaaggagccaaaaagaactaatgactttccaacattgatttctgagtctgcaacttgaaataggtcttgtttagctaaaccatatttgtgagcagtaaccggcaagggcaggggatgtttggattcatggaagacttcaaattgtctgagatttacttgtcgattgctttctccagtgccatttccagttaggtttttgcattattgttatgtgttgtaattatgaaattatatgttctgattccattctttttaatctaccctgatttcataattggatctaatgaagccaattaggtaactgcttcatttttaactaaaacctattttaaagatttgggggcttaataagacactttttaaaaaatgtttccgtggctaggcaagccaaaggggtctttgcgattcaaaacacatttatgcgggcagccaccaccttggctgcccactggtgtcttcagcttcggaaggctctgctcaagttccggcctggggctacccctccagtgcaggaactgcccagtgcattgctcttgtttttgacttagcatccatatggaaggcccagaaattgctaccttgtaatgtgggcacgttcacccggtgtgaacccctctggctattgtgaaacagaagttgagagtatatagccgtgtggctacctcactccgtggggacccatcacctcagactctgtcccagcgctagacatgagggcaaagggatttgagctttattgtgtcaaaatgctttgggtgggctgcaggggcgggggtggggcagggagggagcaggggtgaggcagtaaggtaaggagtccgagcagctccagagtactgattgaatccaggaaagaagcccatggaagtggggtgggggcacctgctttacccctctgctcgtgaatcgccccgttggtaaagtacgcatagtgggtcagtcagaaggcagaacagaagccaagtgaactgaattaagaccccagagaccccctactgtccctggctgtcctagggtaggcattcatggtggggacacctcagaggacgagggagagatttgtagatcttgagacagtaggtaacttgacgacaggatggtggtctgtgccgtttcagcattcccatagccctgtctcagaagttaaacgtggtctgcacatgagcaaagccccttgaggaactgcagtgtagttcagtaaaacaacacacacttaagctatcacagacacagatgaccttgactctctgtcaaggctgcacaacaaccaagaggatcctgataacatcaccccattatacatttaaggaggccaaagcttagagatgacctgcccagtgtagcacagggaacccaaaggggtggagtgctgtgcccacaatgcaccacacacaggaacagcccctcaagtctcagtcaggacccctgtgtaacacagaagccctgcttcctctgagagcaagccagcccagctgtcctcggcccacccagcagcacccgtacagaggagcaattttaagaattcagtccacagggcagggagtagacctggctgggagacaggaagtcagatgacagccttgcggtggcagggaagcctgagaggaattctaatgggaagagagagctggctggtacaaggacaggaacatcatgactgcagttgtgaaagcttaggctgtctctgttaacccgacaagggttttctgggggacactctgcaccagaccacgataaacacaaggaaaagaaaaaaacatttgcaccctcccaggatctgttctacagattcacagttccacatggaggaggacggacttgccaacagccagagagactgaagagacgtaatcattcccctaggacgcagttcctcctggacctcccactcaggttggccccagccttaccaggtccatttcacctacctgctttcatagccagctacacttcagctagcttgacattgtgggtttgtgttttgtttagaaaacactctgcctttctttgcctggccacagccttggcatttgtgtgcagtctgttggccttcgtgtgccccgactctttcatgtcgctggccgtgtttcttgtcaccttccatcccaatcccattcccactgctccctctctttgtccttaccccccctcctctaccttccctctccttttctctcctctctctctctctctctctctctctctctctctctctctctctctctctgtcatctcttcccccctctgttttttgagaccaggacttgctctccagcacaggctgtccccaagcttacagtcctcctgccccagccccttgcatgtcagggttataagtgtaagcctccaaaatgggccccatccttttagcatttctttacagccgtgacttgttgcgcacagtggcttctttatcctctactgttacaacacacccccactagcacatttacacagatggttttgtgctccagtgtcttcctagtccagagttagtgcttggtgcacagtgggcacttgcatagatttgctgaacaaaacagacatgacagagagcggctgcagtagagagggcaaagcagtaacttctgcaccagagacgcttcacagaagtgactgtgagtcaagttgagccttttaaaaatgaggattttgacagaagagacagagaggaatgttgtccaggcaggatatgtattgggggggaaagagggagggagggaaggggagggatggtgggactgaaagggggagggtggggaggtggggagggctcaggagaagannnnnnnnnnnnnnnnnnnnnnnnnnnnnnnnnnnnnnnnnnnnnnnnnnnnnnnnnnnnnnnnnnnnnnnnnnnnnnnnnnnnnnnnnnnnnnnnnnnnnnnnnnnnnnnnnnnnnnnnnnnnnnnnnnnnnnnnnnnnnnnnnnnnnnnnnnnnnnnnnnnnnnnnnnnnnnnnnnnnnnnnnnnnnnnnnnnnnnnnnnnnnnnnnnnnnnnnnnnnnnnnnnnnnnnnnnnnnnnnnnnnnnnnnnnnnnnnnnnnnnnnnnnnnnnnnnnnnnnnnnnnnnnnnnnnnnnnnnnnnnnnnnnnnnnnnnnnnnnnnnnnnnnnnnnnnnnnnnnnnnnnnnnnnnnnnnnnnnnnnnnnnnnnnnnnnnnnnnnnnnnnnnnnnnnnnnnnnnnnnnnnnnnnnnnnnnnnnnnnnnnnnnnnnnnnnnnnnnnaggtggaagggggggggggggcacggtgtgtctgtgacaagagtgacggtcaagaggtcaggtgccaaccaggacacagagtgcaaagggactgggagcttggagtctttattctatccggaaagctaagagagcccattcagagacagtgaacccaaggtggggttgagaggggcacatgagaaggcacagtctggggcacgaggtggtaaaggcgctgccgccacacccaaagacctgagttcaagtccccagacccactctgtggaagaagagaactgaactttgcagtttgtcctctgacctaaacacacacacacacacacacacacacacacacacacagacaacacacacacacacacacacacacacacaccacacagagacacacacagacaccacacacacacacatcacacacacacacatcacacataccacacacatacgccacacaccacaccacacaacaccacacacccaacatatacaccacacacacacacacatacaccatacacaccacacacacatcacacataccacacataccacaccacacacacacacaccacacacatacaccacacacacacaccacacaataccacacataacactacacacacacacaccccacacacaataccacacataacactacacacacacacaccacacacacacaccacacacaccaccacacacacacacaataccacaccacacacacagagacacagacacatatacatatacatacaccacacacacacacaaaccacacacacacacacacacacacacacacacgagagtgggggagccaggggggcggggaggggagagaataagtgcaatttaaaagaaagcataatcataatccacaagaaatgacaagacatcttggaaataaaagaaaaatctagaatgattcactctctggcagcaagactaagagcacacattgaggagacggcacggtaacggagagttaaaggggcctcgctgatcacggagcatcttttagtcttctggtctgtgtggttgtgggtattgaacaagagagggggacaagagttgcagggctggtggcaaagagaagtgttcgccccagactggcttcctgtctgtgggcacagggcctaagaagaaactgaggacgtgagtctggggtccatttgggaactcagaaatgaagtggtgtggtttgcatgggaaatgtcactcttaggctcatggatttgacacttggttctacagctggcagagctgtttgggaagggttgtacagtcccctagaggccttgagggaagaagtgggctcctggggccttgagcttcttagcccaggactacttcttgtctgcagtctgcttcctgttcttcttagatgtaaagagtccctgccacgtggtactgctgccatgcccctgtctccacgttgaaactgtgagctagagtaaatcctccttgccagacattggaccagagctattgggagaatataatgtgtgtaccatccacaaagataacattttaccgccgtctgctatgtagtagatacaacaaaggttccttagccagaagagatggctgagcagttaagaacacttgctgctcttgcagaggacacaggttctgttgccagcaccccctgggggttcacagcaggccataactgcagtttcatgggatccagtgccctcttctggcctctgtggacatcagggacacgttcagttaacatatatacatgcaggcaagcactgatacacatcaaataaaaacaaataataaataaaccaaaaacattcattaactgatgataaagttgtatgtcactcaagtggtgtacttggagtcacaggttttgacaaggctcctttggagactgtgtggagtgagtgaagaaggggacgatagctcttcagagggacgagatgatgacagcaagctgaacctgattatgctgtatctgctccactcaacaaaatgcagagctagagaagaaaaaactttctctaaaaagaggtgactttcaccagccagtgaacctagacgcggtctgactggtcagtagactgtgacccaagaccgtaaggtttgcagaatatgaaactgcaacccagatgttttattgagcatgcagaccctcagtcacttatttccagcttaaagagggatgttcacatctctcgttttcatcaccccagcgaaagctttctccctgctgtgccaaagaaaatcctcgtttcccagttctggtcattactgtaaggtcttgttgaattctcagtcggctttctggaataataatatccacattgttaggactgatacgttttactcagaaatgctggctttcttccagagagtagccgatgccgtcaagatgtgagttgtgggaatgaaaacggtgtacggtaaagccacaagacccttgctaatggcttgtaataggccaggccagcccgagccccattacaagcaattagttaagacagcagttactctgcacacactgcttggcatggggtaaggttatcgggcaagctcatttccttggggtttcggtactaattgcatcttttaaaaatcttgggaaaatagatgctgaaatttctagaagtgattcagcatttgtatgtgagagaccagccatttaatatcacaaccagtgggctccgatactttgtgagattgagagatgaaggtgttgtgaaataatagtgtctgagataggcaaccccagctttctgggtctgtttcctcacctctgaaccatgagtcttgtgcttgctgagatcctgtgtggatttacacgcatccccatgccaaatgaggtgagtggcttgtagatcttgaaaaagggattcaccattccactcctactgaaaaagctggtttaattcaaataacgtggctacacggaaacactcctttgcatatgcaaagtgttctcgaaccatttaatgcccacacactctgctccgaggagcgtactatacatgtgagtgagctgtgctcatctcttccctgcgtttattagacacggagcccgtgtcctcaatggtaacagcttttgtagtaggtcagaattgacaagaaagggagagttcatgtttggagcagaagggagaccccaaacaccagtttcctcatgatttaatggtgagtgtggccaccagggaaaagtctggccagagggacttctgtatgttactgtctgatccaaactcaaattcttacagcacatgagcctttgataaacctgaacgtcaggaactctgtaaatttgtattgctaggaactctggatctacctgagtttccaaggtctcaggacagtttttagcatggttacataaaaccatctggagtgcccagggagcatgcagggacaggtgtacccgaaagggagcagaagccttgatgctgaggccatgcaagaaggaattctgtctggctgacatctccaccttgagggagcttccttgtttttctctctgtgatggggacactgtggggtgtttagtcagttcttcagagaataccttcgtcagatcttccaatatttgaaaaagttccagcaactcattattctacacacacttaaatggaacttcaggaatgaagaagatgggagagagtatccaaattatttcacttcctcttggtttgttttcacaaaatgcagggtattgactgtgtcaaaagacccttgggagggctggagtaatagcttatttagtaaagtgccctgagttcaatccccagaatcgacagacacaacatcaccacaatccagacaggatattgtctgatagtaatcccagaactggagagttgaaggacaggaagatctctagagcttgctattcagccagccttgctacatcactgaactccgtgcggtgagagacccctgtgtcaaaagacaagatggatagaagtcattcaggtttaggtcaacaatgcacactgagcctctctcttctcttcttcgtccagtggagtatttacccgagaagggagagaattctgtcctataccataggcaagggcagtgtggtttaaaacagggttataaacatggctgacaggcgagtgtggtttctctggtgatctgctcaaattgtagtgtgttaatcagctttcagttaccgtgggggctaaagtaccctgaaataaattattaaaggagagatggtttgcttgggcttctgtttcagaactatgagcctttagtatcttggtccctatcacattgtacctgagtggaaggcagatgtcacgggggagtatatataacaaagtcactcacaccatggcagctgggaaggaaaagcgaaaggacaggttctctgtatccccttcaaggatgtgcctcagtttacctcctacaaccaggtcccgcgtcgccacctcacagttccaccaccagctagaccccaagcctttctgagcattccagacccaaacttgaacccacagggcagcaggctctcctagaataaacatgtgactctttgttcctctttctccacactgggtcttggtttgtttccatttccaggttttcttctcttcatataacttctttgttcctttgattttcctatctacatttcacgaggtttcttttctctgatttcacgtttcaagcaaacctgcttcatgaaatagaatcccttcctatcttcatctgtgtctcattctcagatgtaataaaagctgagatcaaatcatctttaataaagaaaatacagagtttggagagcgcaggtgaactgaggagaaagaaatccatcaggctacaacaatcacagagcgcaaagccccgctctcacacagtgccatgtcgagcaagttagtagaggtgattaagatgtcatagtaaagttagagctgctttgtttggtttaaataacactgatgtggtttttttttttcatattgttacatcttcccgattccagcaacagtttttgatagagaatttcgcacagtttgattgaggacctttaaagggaatagtccacatccaaacaagtgtaagttctgtgaatccatctctagaatgcagtccactgtcgtcatgcagtaggactcagctaccaagaactgctttatcggttgagaatttggtggaagttgaggttttaaattatcctcaaagcccaggttcacaagtcactgtttttgactaatcagaattcaggcaagattagttatgcccttcacaaatcagggtgactttctctagggcccagtatccatctgatgctgtctctgctccctggagaaaaggcccagaggcagcttacagaactgcaaaggtttcctttggaggttagccgaaaggttttgtcttcttgtggctgctgaagcattagcatcggttccttttctagaagagttctctgcaggttgatgtattgtaccttctcagaggggaacatactcttctaggtggagcatatcatttcatcctatgatagacatatatgtgaaggccacagcatgggtgagtgggacaatggtcccccaaactgactttcttgggccagggatgtggatcagggaaaagtgtctgcccaacatgggtgaggctcagggtttggcgcctggaacctcaaacagctaagcatgttttccttctagtcttctaatcttaaatcctagaatagcagtggagaggaacatggtggcttgttttttaatgttaatccggcaataagaagggagattttattctgaagttaaagcatacagaggggtgtggccgggtcatctcattaaagatagcctgctaacaaaaactctgaggaaaactgaagggacaaagaagctctgcaaaataggtaacagtatgaataaatcaaactaaaagtgatgaaggggaccggtggcaaaagctttgtcaaagacagtcacatgatcgtgaaattgtagttaaaacccgaagcttcagtacttctaatttagttgattttcttatgtctccatcctgtcggcgcaattgggcattaatctagcagaaaccacattttctgtagcgcatgggaagtgccttttaagtcttcaaagggaacatggggagtggggccacactgcgttataaggtggtaggaaataggaacattattccctaaccactacaacacgcaggcagcaagagaaggtgtttatctggtaattacataaagaggatttctcatccagtgattttttttaaagatgttctatacattttttttcatgatctggcttaaaatccttttattcatggtaaatatgatagtgagcaagattactgtcaaaattaaaaaccgttcactccagacatggttccgaggctggcatccctgcgggacagctgcgtgctcagggtcgcccattgtgtgctccctggcttggtgggcacggccacctcctctcacattgtcttacttgggtagaagcgctggtcatggcattcctatgatccttgagaatccttgagaacctgtgcctctatgaagtcatttccacagccagtcgtggggcagccagggcgatgactcagccaataaagggcttggtttgcatgcaagaggacctgagtgtgagtcccagaacctgtatgttaaaagccaagcatggtggtgcacctgtgtgatctcagcactggggaagcaaaacacagcaggtggctttggcttgctggccagccagagtcactcaccgagtaagctctaggccaatgagagaccctgtcttgaaacaaagccaaaaaaccaaggtaaatggcacaggaggaatgatgactaaagttgatctctggccaatgcacacacctacatgctttcacccaccacacgagcatgtatacatacaaggcaaatctctattacatcttaatttctagaataaacgtgtgtggtttgaagagaatggcccccataggttcatatgtttgaacacttggtcctcaattggtggaactgtttgggaaggattagaaggtgtgtccttatcggaggaggtgtgtcaggtgggctttgaggtttcaaaaagacaagctattcccaggatgctctctgcttcctgcttttcaatcaagatatgagctctcagctgttcctgccaccatgacttccccatggcatcacagactctcaccctctgaaaccataagcccaattaaatgctttcttttatacgttgccttggtcgtagtgttttggcacaataatggacaccaataaaacatatgcaaatttttattttaagacacaaagcattatacatttacatgtgtggtagtacacaagcctgagcagcttcacatgttaggttgacacatgtgtgtacttaacaaacatctccccacatcatgagtttgaggatgctgtatgccatagaagaaaattcaagtttctgagatgggcagatcaataagtgtttaaaaacacttgcacccaaactagaggaacctgatttcagatccctagagcacatggaaatgccatgtgggcatggtgacccaggtggcccacctgcaatttcagcctcaaaagatggagacagggaatccccagagcatgcaggctaggaaggagagccacaccagtcagagaccctgcctcaaagaataagggggagagcaatagaggagatccccaacatcagcctcaggcctccacatgcatgtgagcttacacaaatatttttcatatatgtacacaccatacacatgttcccataaagagaagaaaaatagtgaaaaaattcagtttcaggaaataaaagatttgtcccatcaaagcttcaggaaccagtcctcaagtcttggcatgcactagggatagccactgttctcccacagaagcaaaaatactgttagctactacactcgggcaaccaggctttcatcagtctctgtagtggtggtgttcttggtttctctacctgacacagaggtggtttgactggatgaagagaccaaacgtgacccttgccagagagccctgacatgaagctatggcacggacttgtgttcacactgccagggtacctcagctcacaattcatgttcctcactgttggtcccaaatggcatcagataactgcagtcaggacacagccttgctaaaaatagaacacagtgatacccaggtaccacccagggaggctgtcacacaaagcagcagatggtctccctgcagcagtaccgtgtcacgggctctctcgggtgacaaagtacagatattgtgccagcctttgcaagctctgatcctagacaaggctatcaggcaggcacgcagagtgtaatggatagggatcccctagccgacttggaaggcagcgagcgggtacatatgcctgaatgtccctgattcagcatggcaaacgatcctttccagccagtacacagacagccattgtatttattttcctgaggagccagagagttgcttaatgagcagaggttggaagcaggggagcttgctggctgtatgacttgcatgtttaggagaccggacagataagttgctgtgaccacctccttcagcacgggtcccctctctagcatgtagacgagcccaggaatatgtgtatcctggcgacactgtgtgcatcctgagacggctgcaaacaactgagcgtgccttggtgttgtgaaatagagttcatcagtctctcattaccggcatggtgttgggtacctaccctggatgcagccatcacagcacactggggtcccatagaatgggctgtggctggtgtgagtgagagggtaacaggagggtccgtttcatgtggttttgtgggttgacatcatgcaaaatggaaatctaagatcgtcctgcttaatctgatggcatacatcaaaataatttgtttcactttctcctctggtcttatcattaaatgctgcacacacatggagtttgtactgccagacaaatcttcctttcagcgtgcctaatgaatttgttcatcagagtcccctgatgacttgatggcagctcagtgctgggacacttgccttgtgtgtctgtcagtggcgggacacttgtgtgcatgaagccccaggattgagtcccaaagtatgcaaggaaagataaaaggagggaaagggattgagaagagaaagaagaaaagggaggggaaaaggaagacacttctaaaatcagaatactctgttcctgttgtgctaccttaaacagacctctatctagggatacagtcactaaggtaccattattcctggactaatcagtaatcgtatgccatttatatgatcacagacagggtgtacagttgtgtcatcaaatcttcatcaggtctttaaacaaattgaaagtgagttatgaggcgatggggcaagttggggtgaacaaagcttatcctggagaggggaaattgcaccatgggtgataaaatccctgagccccgatggaggatgaatcctgtgggcctggcaggtgttgccatgattccagcagacaagaaagcttctcagccaacaacccgactttcaacacagttaaactgaggttgtcgatggcaccgtgtaggacaaacaaatacatgaattataaaaatattttaaaagggaggaagaaaaactgaaaattaattttaaaattcattttatgtgtatggttgtttccgtctgcatacacgtctacacatcacatgtgtgcctgatgtccatgaggccaggagaggctgtcagattccctggaactggagttacagttggttatcatccaccaaatgagtacctgggaactgaacctgggtcctctggaagattcacaagagctatgtctccaggcctgcaaaatattaaatttttaaagtgtcaattacaatgtctttttttaaaaaaaaatgatgatggtcacacaaaaatggggccaattccagtaaagtctcagtggtagagttgagaaacagacatgtccttgtctgtctggtgaggcttaccggctgaaggacagctcctggagagctgaagaaaatgtgagttccacggggtatgggaagtcttggctgctaacacgggagagaggatccattttccattctgatgataaaatttaaatcctaataaatcctatttgtgaggccactaaagagccctgtcagctttgaagtgggcgtgcattcacagtctgcatacagaagccacaaactgggccaaagcgcagacatctcctagaatctaatttctaagcgtgacactgtggctccaaggtctgaccttccattgctagtcactgtgtgaggacagcctaggacccacacagggctcagacttgtcatctatcttggtgacggccaatggctctctgaggcccctctggggtagcctgaacggtaaaggaggaagtgcagggggattcctgtcatgagcctccttccaaagcagtggtcccaacacgtgaccatgtcaggtctgactgaccgggcagacagccctctttccttaggaagcataaccacaggcagcccttaaaacaatggagacaaaagtagaatcctcccacaccatggcgagtagatttttgaaagtgtagccatgaggaatttgcaaaactggtgaaactatttaagggacatcttgaaatgacagtttttttttttctttttttgagtacaataccaagttagcaggcagaggggtgcggggggggggggcagggtaaatgaagaaccctccgaaagtcccaagttgcaattggcatgggggaaattgcagagcacatgccagggtgagtccttgttcaagtctctgaaaatgtgttaatttcaggatgtcataatcccctgaggaggcagtgacagagtacacctcccactcactgggtactttgccctaaccatatggtgccacatgacatacctacgctgcctgtcccagctccgcctgcttctcctcccaccagaggcatgtgaacgaaggctctcttcccccagcccctgcacgaccccccgccccagcatgttcttaaatcctggtaggagccctgaaagacgggtgctacctatccactgtcagaaacacagtcactgtctcctatcaaacactgcttgagcagcgaaagtgggaatcacagactgcctctccaacactcttagctcggcacaccagacggtcctccgtggctcaccttggttcctgtttgtgtggggcaggcgggggctggaatataggaatatagggaaggagagaaaagcaaggacggaacagcagctcacctgctccgcatgccccgtcagaaagaatgagaaatcacaacatagatatgcacaccgtccttctgtgtgtttgcgtttgtgagcacttgctggcactttgatttttgaggagtaccagcaccatcagttatgtgtaatgcagagaattcagtcctgacaagaaaatgggccacgcacacaagagtaactagcttaatcctcaaagctctggcaggctaatggatttcaaattggccctaactcgccaggcagaatggagaagggatgaaagagactgtagtgagcccataacccaacagcatcttgttcctgttcaagatttaggaggaagacaaatttgagaaagtaaacaccttttcaaggagcagtgcacacatggagaaacccctctgccttgtgggatggtgtctgagctgcaggagctgctgctgtgggcctaggcatcgctgccacttattagttcctacctaagggtcaagtatatgaaacccaagtggtcttagcttaaaaaatggaaagcttgtttgtggagttggaccaaagttggaatcacagagtctatggacaatcagtggacacttccatgtagcatgactgtgaaactgctctgtggcacagcgcgtggctgtaattcctgccttcctgcccacagagcctcatgtctcttgtgactaggcatattaaagtcatgcccagcttgaagtcattattcaaaggcagctttctgcttctggagctacatacaccatccccttcctcccgcctgactggtgctcagtgaagtccagagcttgggtctctcccattatcctacttggactcataacttctcgccttatgacagctgcctgatgtcacctgaggattcgtggttcaccgtgttcaaaccatgaggtctggggactcttgagcccgtctgtcacttcacttgcaacagtggtgcttttctcttcattccatgaggctctgcaaattaattttatgatgggaaatcatagaaacagagttagaaacacagagcccagttcaggatggcaaccaagtgggtctcatgagagccccactaagtgccaccttatagcactgaatctgggcaaaggggtgtccaatggttagttgctactgttgtagtacagagttcattctgtgttgcctctcattagcaacatttgaaagccctctgccaaatttcactgaacctccagcgttcttttcctcctcttcaatactggcatgtgttcctgatcttcaataaatgaacctgtagcataccctgagaaagtagcccaagagactccagttttaatagtctccgtattgtttgtttagaagccagacattttggagctggggactgaatacagggtgggtttcttgctgatcaggcaagcacctggaagctgagccaccttccaactttctgagtctcaccaagttgtccaggttgactttgatctcattctgtagctgggccaggccttgaacttgcaatccttgtacctcagcttctggagtagccaagtatcagtgcccccatcagacatggaaagtcacccagtaaaggcagaggaacaaaagattcccagagacccaacacttggctcagccactcaaccttctatgggcttgggcaaataatcttgacttggtgctgcagacagtggagtgagattgtagcatccctgctctatggaattgaatgtattggccataacatgactaaatgccaaatgctcagaaggcaggtaggatctgttgttctgttatagatggttagaacttctttccctttagcttacaggcaggcaatgtgtcataaatgctaatagctttttaaaaagacaaattctaaatgttgggttggtccaaaccattctcattacttcttagtctcatctgacatgacaaaacatgctctttctgtggtagcaagattgtggtcagttctgaaacaggaggcctgggggcactgagcccttcagtcacatctagaaatggagtgagttcagggattactaccatcatcgccggtgtgtatgtgtgtacatatgcgtgtgcacatacatactcactgggtttgagctctgtgattcagtgttgcttctagtcttaactctgtgtgtttgttcatttgccaggctcagggctatttgaagcaatttgaattagagccttttcttgcattcatagctcataaaatgccaggctggaaaaggtatggacacatctaaggcttctggtttcacagatgagcagcctgagacttggcgagtaagaaacccatttgccccataggatagatggtttgggctgtgaggaagtcaaaactcagatatcccatcttttcaaccggtgcccttccattgcccaaacactagctctgcaatgtcaaatgtgagcaccacacgggtggtctctaagtgacactaacagtgtcaacattaataggtcgcgctgacccaccattattaaaaggacttgtttttactcctgtctattgctcctccagtctcctagacagacaggcgcactgttataaaaattagccaaagcaggaggattatggatggtacatgaacatcccagagaaaaaggtcagttcatctatgagtcttgcattttagatgccctgagaagatctgcatgtcactaagttattaggcggatcaacccgcagcctacgagtctggcagctaatgtacttccctgactttaggctaccctgtggtcacacgtcttcagtctagtgaaatgaggaaatgatttcacgttgactagctagcatcagcctgggaatcgaaaagccatgagcatgaccacaagatgtgccgtgtaaagtgaaatcagaccacggtgttagcaggcaggcacagcactggttagcaggatgaggaagtcgcccaggctaccaacaggcctgcagttagggcttagggtcaggtaacaacctgcctttccctccctcccacagagggaaaaggaaacttccttgcaaaaaaaagtagagagagagggatatctggctgttttgtcacaaactgatttcaatagaaagaagaaacagcatatgcagtatttaaggttgttttcgtgaaaacagcaagctgcattgatttttaaaaatctattttttagtttaattctcctataaaaatttgtgttagttctttgagagttttcctagatatctcaagtaagacatgcagtcctttgcatgtatgccctagacaggtctatcaggataacacggtagacctattatcagcttcttggaggcactccacacttgattccatattggctgcaccactttgcagtcctccagcagagagtaagtgttcccgtgcccaatatccatgccaccatttgtcagcatttgcttttttgattttggcccttttgactgggcttaaatgaaatctcaaagtagttttaatttgtgtttcttgatggctgtggatgttgaatatttttaaatgtttctcagccgtttgcatttttctgaatgtttagctttgtgcatccccatttaaaaatgagcttttcttaatgtttaacttttgagctacttatatactctagatgttaacgctttgtcagatgtatagcaggtaaagactttttttcccacatctacagaccgcctcttaatttgagtaatagtaccctttgctgtatagaaacattttagttttgtgaggttccatttattaattattggtattaaagccttttactatcagggtgctattcagaatgtcttgtcttacaccaatgagctcaagcctatttcccacttgctccccttcagatttggggtatctggtcttgtgctgaagtccttaattcctttggagtagagattttaagggttgagtgatatgggttaagtttcatttgtctactgtggccatccagtctgacaagtagcatttgttgaagatactaagttctctccaatgtgtatttgttggcttttgtcaaacactgggtggatgtaggaatatgggtttatatgtgagtcctcatttccattcatcagtgagtgtcatgctgctttcactggaattttgatagagattgcattaaacctgtgggttggcttttggtagggtggccatttgcacaaatctttcacttctttagttagacttggtctattttatttttcttgaggctattgtggatggtgttatctcctttatttctttctcagtatgtttgttgtttgtgtctatgaagtctactactggttttgttttgttttgttttgtttttttttttttttttgctaatttgctgaattgtcaggtgtaggagtcatccagatcttttacatatagaatcatatctacaaaaatactttgattttcctttcttatttgtgtctactttatcttcctgctctagctaagactcaagcactatgttgaacaggggtgggcagagggaccatcattgcctgtgcccctggttttggcggaaatagagtttttctctgttcagaatgatgttggctgtgggcttcctgtatgttgcctttattatgttgagaccaccccctgtaaccctagcttcaccaggctttttattgtgaatggatgttagattttgtcaaaggccttttctcagctcgggaggtgatcatgtggtttctgtttgtgtggtggattaagtttatcaaaccatccctgcatctctgggatgaagctgatttggccatggtgaacaatctttctgatgtgttcttgaattggctttgtttcacgtctatgttcatcaaagattctgaccttattgtttcggtgtcagaacagtgtggttcataaaaggaattcagaatgttcatccttttctattgggtagttttgtaggatagtttgaggagtgttggtgttagctcttctttgaagttctcatagaattcaacaatgactccctctgacctgtgtcttatagttgggaggcttttaattactgcttctacctcaatgggtgatgtgggttcatttaaatcatttacttcatctttatttaggtcagtcatatatatctagaagttcatccatttcttacattgtaaaggaaggtaaccatacatggactatggatatagatggttaatttattaaggggaaatcatttacacgaggagccgatgacccaaatcggcgctccaagaatccagtctcagcagctttccaaacccatctggaacccagtgagaggcaagtgcccctctcctcccatctttaccctgcaagccccttaggcacctgtggccatgcccaaacaggtgtggtcagcgacacgggtgtgtagaggtctctcctacattacattttccaatttggtggaatgtagatctttaaagtatatttgaaccagtctctggatttcttcaatgtctgttgtagtgtctcccttttcttgtttaatttggatactctctaattcttttggttactttgatgaagggtttatcaaccttgtcactctcttcaagtaactttcttccattgatcctttgtgtttattttcattctatgctgttcatttcagctgtggttttgagtatctcttccaacctatttcttttgttgtgtactcttatttttctaagaataggaaaatgcactgtcaggtgcatcttttagtttagaggcctctcaaagtttttgatgtaagcacataatgctgtaaactttcttcatatggtgactttcattgtgtgctatagattttgccatgatgtgttttcatttttaatagtatttattattcaatttccttcttgattttatttacccaattttgattcagaagggtgttgtttagcatttataactttgtatactttctgtcatttctattattgttgatacccagctttattttagttattagataaaattcagaatgtgatttcaatttccctgtatttattgagacttgcattgtttcctaataggtggtctattttgttaaaaaaaaaaatcccataggctaaaaagagcattatattcattaatttttagataggatgttctatagatgtctgttagttctattgatttatgatgtcattgaactcgagtttccttcttttgctgagtgacctgtatgtccatgagaatggaattgaaatcaccaccatcactgtgttagggttgatctgtggttttatgtttaatagttttcttttgtgaaatttggtgctccaattttagttcatatgtgtttaggattgtaatatcctgttgggtttctcctaaatgagggtaagtattcctatgtatctcttctgattagttttgacttgaagtctgttttgtcaaatattagaatcactatgccgcttgactgttccatttgcttggatactttttcccatacttacactttgaggtggtgtctatcactggtcctggatcctgtttcttggcaacagcaaaaagatggatcctgttttctgatccagtctgatagtctgtttctagttgttgggaaattgagatcaaatgaactttattatcagttaagagacactattgaacaatgtgtgtcaattcctatcattttgttgattttatggtgtctggaattgtttttgtgccctcctacatgtttacccttttcttcagacaggagtgttctttccagtttcttctatagagctggattagtggtcataaattaaatctgatagttttgctgggaacagtcatctacattggcacccactgtctttcatagctcgtaagagtacataggtctagtcccgtctggatttcatagtctccattggaaatttattggtattctaatgggcctacctttgtatgagacttgactttttttcttgtcattgtaaatatcctttgttttgtacatttggttttttgactattatgtgatgtggggaatttcttttctggttccgtattagaccttgataggcatctcatttcttaaattatgtattttcttttccttctatacttattattccataggtttggtctttttttatagagtgagttcccacatgttctgttcttggggtttggggagggatttgacatttcctttagttgagtgatctagttcctcacttcgtcctcaatagttttacctactccaatctattggggaaactttcatgaattcaaacaaattcagaggaatttttcatttcaagctttattccatttggcttctcttcagagatggtatctctttactaaattctgttttcatgtcttgagttgtttttgttatttcatccaactatatttctacagtcttcaatttggcatattcatctcctttgaattctgggatcattttttttctgtttgaatccttatcttgtgtatcatctaagtcatttttctcaggggacattacaatggcagttcaaacttttcattatttatgatgggatctaggcatctggaataaggtcattggtagtgtttgttgtagaaatcttgtcttctgtgtggagggggtggctgaagctctgtgtcctgttatgccagtttgtcagatgatttaccactgacgctgagggctcagtctttggcaattcagtgttgacgttcaagtcgggcatcagaagtaaacttggctcagcttgagctcagtgagatttctaagcccagagaagactttctgtaaagttagaatatgttcatagcccagtttcaggcaacaggtactactggagacggacaagctagtcttgaatccctctgtgaggaatggggtgagcggaggcaggcacagggcatgtcctccttgtgcctatggtgaccctcctgggagagggttagtcttagggtcatgggtatgggtagagatggcagtataaagctagtgcctgcctggagaagaggccaagagggtgcagcagagataggtggggctggaggtgagagtctagactccctgcctagggacaaggcacttgggacaagggatctcagcctttcttaattttaaacactggaaaattacctatatatccatttcagattatggttggttgacagtcaagaagactagccaggaactacccaaagggggtaaaaagagagaatggaatccagaggacaggaacagactctcttttctccctggcacctccttgtctttgttgtctgtgactgcctgtggtttacaaaggacgaggaggcccaggctgggtgctgcttaccattgtctcccagtgcctagcacaggcacaggagtcacaagcgggaattatgaaaggaatgagcaaacaaagagactaatgcagacacagagtggagaatgagagtcccgtggcccgggcagctccagcagagtctgctgagagagagctgccattgtttcctgaaaagcaggcagccttggacatgactgacctagctgggtgcctgcagtgaggacatcctcaccttccctcacttgtggcagtaattgctgtgtctcccgggatcatctgaccctgtgtcacctgatgaacctcaacatttctgcccatggggaactccctttcttccaagtcacatgtgccccgttaccctcctctacccccaccctgcctccatgtctcttctgaccctgctcatgtatgtgtgtgtacgcgtgtgtacagtatatgtgtatagatatgtaagggtttaaatctagctagatttctcatatgatagaaacacaacgtgtttatctttgagcccagattctctcaatagtctcagtgccgcccacgtccctgttctcagacacaaagaacagtgacaccgtcagcctttactttcgtcccctgagctctccctgtcccatctcctctggtggccacctatttcccaccccagaagaagagctgggacattctgagactctgacatggagaaatgatcacttttggcctccgagaaaagggtgcttttccagccaagctctcctctaacagctgggggggggaggtagggatgtcatccttgtacattcatctcagctgttggctgcccaaaggctgcccaaagggaccccagtgactagctggtcactttcagggatacatcctaagaatcaggatgatgttgaggttgctgccttcaccatgttaggtacaggtctgtggcaggaaagtgaaatcatcatcacccccagcttcagttcaaagctcccagccagggcccaggacagggctcactgccaaagctgaagatctgagtttgattcccaggccccacatggcataaggaaaaaactgactctggccatttgtcttctgatctgctactactactacacacacatacctttgatccctaaatacctgcctgtaggtgtggtcagagtaactgaatctgtcactctaaaactcagaggaagtgatgaccctcagtcacttttcctgccactggagacagggaatcgtgtgccccatacacaagaagccatgccaaggaccagtgatgtcaagatgggagtggcagtccaaacacctcgcctcactgcactctggggaaagagagggctctgatggccctgtggttgggaacccaggcagagttttctctggacttacctgggaggggaggagttgtaagcaagaagctccctgcaggggtgacagaggaaggtattcagaagctggcccccacgatctgtggtgcaaagacttccggttcccagctctgacatgggtaattaatctgctggagatgggggttacattacaatttgcagagtaagtgaagactgaaaaatacaggctaagttacgcacactgactctatggtgttcaccagttaggaagagtttctgagacttaggggtgtctatcacaatggtggggaaacacacacatacacacacacaggctgcccagaaaataacagaagtggcaccagctattgccatctggggcaatggcaccactgtaacacactgcttccacagggagcagacagtaggaccccaggccacgcccttccactcccctcctcccccacatggagccgggggccacagaactgataaagaacctcagcagagaacatgggcaggacccaggcatgggcgggcacagttcatgcttttcctatctcctgccccccccacccaacaaacacacactgagatccgatcctgctaccttcagacccatcctccatctctggatgctggcttcatccaggatcacctgggagtctggagaagtcatcgctggggtctttcccagtccatgaggaccaatgctgcctcttcttgcccctggccagaggaggatcctttggtgtatatgctgagagactgagctttgggatttgtttgagacagtgctgctttgtagcccaggctggcctgaaattgacaatatagccatgccggccagtccccgcctcagcttcagagagctaggattacagatgtccaccaccatgcccaagtgagaccacaatgatttagatttcaataataataaatgaccagaaacattctctgtagtgtctctggctccggcccacactcactacccagttcctgcatttcttttaggagaagaatctggactggtttcctcggatgcgggccatgtcacttgtcagcaatgaaggtgacagcgagcaaaacgagatccggaacctgcaggagaagctggagtccaccatgggtctggtgaggcagctatctgggcagctggcagagctgaaggagcaggtcagtgagcttcagtgagctgaggtggggggggggggggccccgggaccccccctgccactgtgagcacggggacccagaaactccaggaaaggaattccccaactgtgctgtgctgcggtggcttctggtggtttctcagcaagcagggactcccccacctcctgtgcagcattctcactggaaagacagggaggggcccatgttgctcttggtgatggatcttatttcctgcctggctttggatttccaagcttgttggaaaggcagacattcactaaaagctgtcactctaaggtcccgatcaacccatttatcacacgatgtcctcagcaaccgtaaaacatgatatcgccaggcccgttggtaagctgttaaatgattccagcaacagattgtgtttcttacaacaccacttcctgtttcctaagcatggatagaggagttggtctttcttctcacttctgtttctggtagtttacttaaaaaaaaaaaatgcttttgcggtgaatatattctgtgtggaaccagacagtggggttcttggggtgaaaaaaaaatcaaggaaagcagctgaaggcacacactttctctctctttctccagatgacagaacaaaggaagaacaagcagaggctgggcttccttggatcaaacacaccccatgtgaaccatcacatgccaccacactgacaccatgggggcacgccgtgaccagcctttcatcagatgcctgcctcgttgctgaaggaaggatgagatggagggagcaaacagtggctattgttgagaagctaaaaacagccaagtgccaagatgctgagccattgagctcccggaacaatccgtaactgtgttttcacgcttgagaagactcaagctaaaaaaaccagcacagggcacagactctcagtgcagcaggaaacaaccaggctgggggggagcagcagactgctcaatcgatgggccttgggctggtctctcacatgctgtctgcaacctggagtccggttagattttatttcttcaaattgtggcacacaggtcagagacgagaagccacactcggctggtggccgagtctgactaagaaaaaaaattttaaagattaaaaaaaaacaagacctgaaaaaggaatctctgttaagcttctgaatcttacatgtaaccggacagtttcttcacgacatgaaatgtgacgggctcagagctctacacgcttggtgtgctttgaaggttcacaccccacacacggaaaacataactggagcagggtcgctttctcccggattctgtgcagggctgcacaaaagggaggtttcatagaactggctaagagtgcgcttaaagtcacgtgaatgccaagatcatgaaagtggagaggcttgaccaggaagcagggttgagcacagatgctattaaaatatactggtattaataaaggaaacactcaaagggacagagaacattgagaaattcctctggtggttttgcctttcacaagcatggagtaaaaagcaagttgatttgtacctgtggtgcctgaggacctgagtgtttgctatccctgcagcggtgggagggaaatctaaggactatattgaatactcaagaatatgcaggctttcaatggctgttacagtaacagtttgtcaaagtgtaggcaggatggaagttccttcccccaaactgtttccatgttgaatcttgggaccagaatttatgtagggagagaatagcctgggtagatacattgtttttggagactatttgaggcgttagagacagagatgaggaaagagtgaaaactgtggtggagggccaccagccatgacactacattctgagcctctcagccaccaagggccacgtggggtttgttacaacaacgtttaaagctttagggggcttcaaggcagctttagctgttggctcctaataaataaaatcctggatctatatggactcactgtgcagctgggaagcctgagtggatccaccttctacttcatgggtctagccttgggacccagtgagaggcactgaatttactcaacctgcacacactaagaccatcctaaaataagacatgctcttggacagagcaggacttctcttagcctgaagttggaggctgctgacacccatgacctaaagtgttgtgagctaattcagtgcagcactgacctttggcccttgtcagggatctgctgcagttacccctaattctttgatagaactttaacgtataattaccaacttttgtctaatggtgccaccaaaattagactgaggcagccatttttaaaaacccaaggctatcaatgctgtgacagtctttgataaaagtccagtacactgggcaagagaaaggggcggaaactgctgtgtggtatgtctgacctaacgtccaagccattacagcagctcactgtctgacactatcttctcctgtgggaaatacccagaagagatttctcctaataagactctcactgtgtcaatttttttcagctgcaatttttctttctttcccctctacaagataaagactataaaatgaaatttttaaagaaaagcaaatgaaacaaaaggcacttttctaggacatggaattcataaagatatttaaaaatgaggaaatctgaagtctggtgagagttttatatttgttatgtgtgtttgttaatgcaaactggattgtttgaagttgagtatacttggtattctcatatgtatatagcaatattaaaaacacagtcacctctgacttctgtgctagggagggtttttcttaatatttaggttattaaaatccatattgattaaaagtcgcagctcccactgaataatatttttaatttacaaaagggtttgctctcctgtgtgttccattctgaggctaaagagtttaatgaaagatgttttctaaattaaaataatcattggggagtagagatcttgcactatctagagagaatattgaccagttgtgtgcatgcaaagatggtatttcctaccctttagaaagttaagttacaaaagggcttattttcctcaatctgccattttttgcctgtggataaagattgcaatttttggtagactattgataatttcagggagctaattcatttgaatcaatgctgatattgtgttgatccccgtatctccaactcacagctcaggcttttgactgtcatttaattaccaactgtaacgtggtatgacccaccctgagactgagtgtgagtaaggaggcctggaggttggtgatgaagactagagaggggacttcacttcccagcatgccatgtaaccgggaaagaagcagctcaccttcagggacccagtcgcttgagtaggtcaacaatgcatggggttgatgacatcacatctcagagcctgtaaccatgcagacagccacactgtggaagagtaaacagaaaatggcacattcctgacagccactttaaagctttgttgaaagattctatcctggagatcccttccaaaatagtgtcagatgcaatacagttatcacctggagggagcgggcatcttcaacccagacacagatggctgtaggagccaggcaaagagctagcaaagctgtgcacatctctgaggctcctgccctgagcaggggtggggaggctatgtaagccaggctaagcttctattttcaaaatttgacagccaattccagatttcagaaaatgctggaggctacccgaggccctgtactcactcctctgctgccgctttgaaataaggattgataggactcctgtgtagaagacgacaccatgctcaaaccaaacagaactgagtgcatgtgaaaacagagctcttgtgatcagctctccgtcacctccctggagtgttcccacagactcaagcagttcgtgaagtgactgtgccagttcttacatcaacaaatggattctctttcctctagcaagagagaatgtctatcttgtcttttaaaaaggtgattttaacatactgtcagggactggataacttattagttaatattaataaaaagaatttgcatctgg

SEQ ID NO: 4 - DNA, 170009 bp, Cricetulus griseus
  misc_difference 17173..17916: note = n is a, c, g, or t
  misc_difference 43565..43690: note = n is a, c, g, or t
  misc_difference 48930..50006: note = n is a, c, g, or t
  misc_difference 65976..66033: note = n is a, c, g, or t
  misc_difference 75729..77238: note = n is a, c, g, or t
  misc_difference 90975..91330: note = n is a, c, g, or t
  misc_difference 120186..120287: note = n is a, c, g, or t
  misc_difference 121615: note = n is a, c, g, or t
  misc_difference 154068..154153: note = n is a, c, g, or t
  misc_difference 165432..166655: note = n is a, c, g, or t
  misc_difference 168338..168614: note = n is a, c, g, or t
  source 1..170009: mol_type = other DNA
atgcaagagagagccaccagcccagaccccagacctaaactcgcttctgctccctgtcacatcctcacttatgaccaaggtgtgagtggagtatatatctcactgaagttaagagtttttttgtttttgtttttgtttttttttgtgtgtgtgttttgaaaacattttctatccttgttttctcaaagaagattgggtgactccccctgtagtgttcatgcctcagttaagaattgtgaggtatgggtggggagatggttcagctctacatagtaccaacataaaaagcagaacatggcttcacacttacctgaaatcccagaatacaggacagtaggcacatgaggatcactggggcttgctggatgttagcctagctccagatccagtgagagatgctgcctcaagggaataaagaggagtggaatagaacagcacatctaatactttttcctaccttccacatgggcatggtgcaggcacactcacagaaatgaatggcatatgccacaaacaaatgaacaaatacataaactcagtgaaacagaattgtattacttgatttctaagcatgcctttgatatgttgtaatattactactactgtgactaatattaataataaaacagtgttcctgacctatttagtaaaactcctccatttctaaatgtctgtgtctatgtggttgaatgagcagtctcaatgggggagagtattagagcagaatattaatagtaactgctcatagatgtaccatcaaatgggccaatcttgtttaattcacttttcagagtttgaagtcctcatagtgaacaatgccacaatgaatgctcacagctaaattagtgagagtgaaaacaagtaagaggaataagctagaactttgtgctgcaaaccatcgcacctcttcgataccatctaggcaccatctctcttcctcttcctcttcctcctcctcattcacctctctatcttcattttgttgcctttttcattcctcctaatctccttcccttcatctttcagtcttgggattattatttctgaaagggctttacgttcactcctgctcttgagtgaaatgtatcccactgatggaattctcagtggatggttcctcctgctctgtaatctgtggctattggctgttgtctttgctgttatttcccctctttctcccagtaacatcgatcgtttgccattcagctcttatactttgcttcccagaatcctctgcctcagaaaatattttcagttcttccatctttcataaattgagtaaaattttcagctacttatgcctccaggaagtgccttactgctgatttggtggtcaaggacatcccaatgtgtatctattagactcactcattggttttttgccaatttgtgtttcttagtttttaacagatgatcttttactgttgtttcaaggatcagttttgcccagtgtgtgtgttcagtgtattacctttgcatttggtggttatgttgtctgctttgttaatgaaaacacccttttggattttcagatttattttcagttttgtttaatatacagttgtgtttgactcatattctttgtacttaattaacatcattgctacctttgtattcccaagcattttaaccattatatacaaatttaggtctgtgtacaaataatatgacttgaggaaaatattctagtgctgtaatgttcctaggcagaagtctggagaatagaatgaatgatcttggatctgcatgagtctgccagcgtcccagaatcctccttacctctcctcttcattccagaaaattgaattttctattcagaagtaaaacatgtgcatctcaaaaaccctctggtatcatataaaagctgtgctaaaagtactaaataaagaagatgaagtcagaaaaataatttatttttcaaaataggggattttttttcaaatcggctttaggaaacaaaaccttttcatatccagttgaccaaagctggatcctacgacaagcacacatacctcactagggaacctggtggtccaggagatcaggagatagcatgtcttagatgacctttaataattgggccaaacctaggttcctgtgctcactgagacatggtgaagaggactatgcccgttggaaagtaatcaacatggcttctaggatgctcatttaaaattcctttttggaagtttctattttgtttgaatttctttcaatatgagattttcccttcactatgagaattttttaaatgtaaatttgtcatatttcttgtctgtgccccatccctttctcatccactctttctatagcagtcatagagctgtctctgtcttgtgttcagaagcaaatattgggttatttttcattagaattaaatttctggggccattgagctagctcagaagttagaagccttcatttccccttacagaaacactgggttcagttcccaggacccacaaccgtctataactccagtttcaggggaacctacaccttcttctggcctctcagggcattggctgcacactgtgcacatatacacatataggcaaaacacttatacaataaaatgtaaagaaaagaaaaagagtgcaatacctttttttgttttgttttgttttttgagacagggtttctttgtgtagctttggagcctatcctggcactggctctggagaccaggctggtcttgagctcacaaaaatccacctgcctctgcctcccaagtgctgggattaaaggcatgcgccaccaacgccctgcctgcaatgcgtttgttagtgcagttactttactaatgagataatttctaagtacctgaagcttcttaagctcttgaagcaatgtacactcttacgtagtttgtagcagttgggggcacacctcacttgctattcttgttttcattcataaatcttaaagccttcttctatccatattttcatgaaatccttaaacactgacctgaaagttaagcagtcagaataaactggttaggaatgcatagacagcctcatcactatgttaaatattaaggaaactttgaagggccctggtgatagtgtagagattcagcggcttgctttgcagctgcagtggaaggctgtgcaggggaacatacatagtggtaccagttagagtactagctaccatatgtgatctgccttgaggacaataatctggtaggattgtggtggtgggagatctttgaaaagcaaggctctgcagttcttaggttctacacagagattaatgagtgacaactccttcttttcctgctcacaccacagtagcactgtcatagggacctgcatttgcctatttgacatgtgcctaaggaagaaactgcttatcctcggctgcactgggccctgatgacattatttattacagatctctaattttattcctttcctgatttccaaattgtgatttcacttcatacttcaagttgttttgacataaggtttgaatcacaagattttaaaagacctgacttgaaactccttaatagggccagtgaatagctgtcattaagaaggtggaatatagcatcatatttcaataggtgtggcatgcaaaatacccctcctgccatcgatgctctcttcacattaaatggctcagataggctgtgcctctctcactgtctttctcccttaaatctgcacatatctcatgtgagagcctggaaatttacttagtgattttatgaaaaccagactttcccccattgtatgtaagaggtctatgaagaaaaatattaaagattttccttatcgttaatgactcacttgctgtgcagactttaaagcttttctggtatttaactgacagcaatctgtatcccataatgtgaatgagattctgcactatgtgatttgttatttactcagtgaaaggaaaatattctcaatgtggtgtgctttgagctgactcttctttagcccttgaatctgtagctataacagcaagatgtttgtagctaagagcttcagtaaatacattcctgttactgcacagcttactctttagtaacttatcccaatcctagacagctttgctaactttgtatatggaaaattcatactttcaagacactagaggaactaccgtatgtataaggcctcccatacttctataatcatcactcaagcatatcacctccagtaaagtttctcttgccttagaataaagaccaaggattgttcatgcctctgtgtagcatcctcctgacaggattccaggacagttatatatgcctgttgagtaccaaagggtgaggaagacacagatttataagaactctgaatcaaaactcctcctctgggttgctcacccacaaaggaggaccccagggaaaaattaagtcaaactcctgtaagggttcaggtcttcaatttgaatgtctgtgttagttaaatatgtgggtagccattcttgtggaagaagagccagggcttaaggtgaatatccaggccagcatacacttctcacacagctttgaagtctgagtagaaaatgcactgatgctgtgtagcatgaagcattagattagccattgtgagtaatgaccatttctgcagcagcatgtctagaccacttccctagagcttctaggtgttgggattttgcacttggaacccatcactgcagtggtcttcttacatgggggattcatggcatcctctacaggatgggaaagctgtctgaagctgctggtgacagagagcatggcctctgcagaacccagttgatgtctctgcatttagtataaccctgacctacttttaaggctatggccacaaagctacatgagatcatagcatttttctggttgtgtctaccagagtatatcacctgtgtatgatattgcaagccaggggatgagcataggctatgtgattcatgtttgtctcaggatgagagtgaagggtcttttggaaggtaatagatggttttaaatctatatgaactcacaatttgcttaatgacaatacaggcgactgcctgtagaaatgtgtataaatatgtttatacttacatattggtgcatagacatagttctctgttgtctaataactgaaaggatttcataacagtgatcataatttgaaccaaaatgaggtttgtaaaagttctgatcttaaaggaacaaaagctgctttaaggtaaacacaggagttaactatctcagtatcaaccattttgtcattccagaagggagatcactcgtaaaaacacaatcataaggatgtgtgtcaaagggacataactggaacatggcagctgaagacaaagctgtatacaaagcttgtcatagtaatactattccactacaaagtggaatagtaatatgaagttgttttgagttataacctgaagtgtggcttcagacatccagacggacataagaacatgtctgaataaataagcaccgatggagaacaaatttctcatgcaaggatttagtttatgtagtgaatctcactagtcaaagaagattggatttctctagagataacagcacagagtggagagcaaagattcagcgactacaccttttcaatttccactagacaatgaaattgaatgtgcatggtaagagtcattttgatagttcatgtgatcatgacagtggtactttatcttcaaaattttcttctcagaatcatgtatagttatttttaggaattatttcattgtctgttatcggtatgcaggtatgagtacacaggtatcaataagtcctgaagaacatagcatgttggatctcctggagctagagttaaaggtgacaatgacctgcccaccatggttgcttggaattaaactctggttctcttcaagatcagagtgttcttaaccattgagtaatctctgtaactctagcacccccagtgtgtgagtgtgtgtgtgagtgtgtgtgtgtgtgtgtgtgtgtgtgtgtgtatgtatgtatgcatgcatgcacacacacacacacattaactacatgcgtgcatgtagttaatgcgcatgggtgttttgcctatctgtgtattgatgtaccatatgcaagtctaataccctgggaaaacataagatgcccttgtatactctggaactggaattacagaatgttttgaggcaccatatgggtgttggggattgaacccgagtcctctggaagtacagccagagttcttaatctcttaatcatttttctatcccttatactcctagtttagagaaagcataagactgatcgtataccaggggcgtactataaccttctgtagcacctctcaactctgtcaaggttatgcaaaacaagggaagagaaagaagttctcaggctagaagtgtctcaagagacatgaacgctaaacataatgtgatactttggaatggaatctggtactgaatatgatgttaggataaagccaaggaatctaaagtacatactttaaacttgttttaaattctcatgttatgtgtatgagtgtttgcctgcatgtatgcctgtgtactgcatgtgtgtagtgcctgtagaggctagaagagggtgttaagtcacccagatctggaattacagatatcaacttttttatttttctttcccatagtggaaaaagcaactgaattatagtgggtaaaaagatattatgttgcagttagtgctctggttatagcaaggtaaatgccatacaaacacctccacattccaggctatttctgtgcaagtggtgttctccacctttcttatgtagagaactgtttagggtgactcaaaaacagacattttctatctcaaggttgagtcattttgtgaccttggtgttcttcctttaaagtcctccagattctgaggcagggtggaataggtggaggccatgtttgagattccaagggctggctctgcatggaattttaattctcacatcccctcacacataaggccccaaaacaatgcccttgaatgatacaagaaaagtagtcagacaattttgccctttctgagaataatatctcttttaactgaccatggatcctgtaactcatcagtaattgacaatgatccacaactaacacaagaggtcagcaaaagatttcacaaaatttcctcacaaggttgttttttgttgggaaataactaaaacaagcctttcagaagatgattgcctctgatgtgtgttcatgaatcatagtctaccaacatttttgttgctgcaatggtaaacctttgtttgattacttgaatttcccagaagtctggcaagggttagccttgtagactgggacatgcacacttacagaagcaagtagcccacggagactttatctggcagcatagggacctgaacagtaagtagcattgatctttccaaggacttgcaataagcctatcattctggaataaaatgaaccagaaattttcatgaagttgacataaagtgccttaccaggataggagccttgtgcatctgccttagattcttaatacattgactggaaaattgaacattcttagactacagtattaaaaaaaaaaaaccttttcactgtcatatattttcataaaaattccagtataagttgatatcacgtgcctatcattgttttctatgtctatcacttttatgtaacaaaatgaattttggccatatatggtggtagatcctgcaatccagacaccctagaagctgaggcaagagaattttgattttgaaaccagcaaactctgcccctatttttttaatagtaaatgaagggaaaataaattagggctttaatagataactgaagtagtccgccaggtttattctgagtagaattccaaaagtatgtttaaaccacttttgaaagtgttcttgagccaaagaaaagccctcactcttcattccacctctcattctcttcttgtgttttgaccatttttcttgtactatttttcaggggaactcccaaaagatgtttttctttttttcatagcaaatgtaagagaaactctgtgcaagactagtgttaaaaaaggaaaagacttctccctgatttctgggggaggattgacggtcttaaacgggaacaagagattggggtttcagctgggtatgaaaatagctatcttcattaagtaaggctaggcaaacagctgtatatttggataataagcagggaaagatatttgaatttcattagtcttttttccttcttcagttagcaaatatctcaccttctaaaattacttcaattgtgattcacccacaataagcatgtaattaaaattgaagaatgtttaccaggtaaggaaagttgctaaaaggagcttggaaaaggctttaaaatatgtggaaagaaggcaaatcaaggagcttgtatacttatgagatatttcaggtgctgtaatgtggggaagattttaaccaagtagacttacaagttaagtcaccagtgttgtcatcattcaatcaactcattcattattgattaataatggaatggcttttgcactgaacttgactggggatgctgtattttgttatattagtctaaagggggccgtcaacaccgcatgagatgcacatgaattttgtgaggactgtggaccacagtggatatgtgtgtttttgatggagcaaaggactgctgccttactctgggggaagtgccctactatcttgatctccttattttttttcatcagagctgggaatgcgaaaagttacagtgaagcacaatgtctcatcatcactggagtatgtgtgctttattgacaccacattatgaacccctaggtccacatgatgtgacacagaatctcttaaaataagtaaaaactgatccgggcagtggtggtgcacacctttaatcccagcacttgggaggcagaggcaggcagatctctgtgagttcgaaaccagcctggtctacaagagctagttccaagacagcctctgaagccacagagaaaccctgccttgaaaaaccaaaataaataaacaaacaaataaataaataaataaataaaataagtaaaaactaagtctagtaagaagggggatcatggtgcaaactgatgtacttggtgagataatccatgcttattttgatgataatgttgaaaagtaggtgctttggtgttgttagatagtaaaactgataggtggatcatctcaagtgatgtatacaaagggttaatattcttaggaaagaccctgctgtcataatggcacccaacaaatacttgtctgatgaatgtgtaaggacaggtgatgtggatttgcagtaattaattgagaattggaaaattagcacttctcacaaaatttaaactaaattttgatatcaggtgtggagaaggtgctgagatggagatctgcagacatttacacacactcagaagaagcctagagtagcagtagagagatcatagactgaatgcctggctgtctatttgctgagcctacaagaagacaatgtgtgtctggaccctatgcatagcagtcttgacaagtggccttcagccaaggtgacagctactgcatgtcttctccaccgattaattgtcagatatctgtgtcccattccaaacagctggggagccatgctgctaggtaatggaaccaccatagattctgtttaccacttggtcatgttttcaatgatttctgaactacatctgtgttctctctggtacagtcagaattgaaagaaggaatgagaattgatatgtgttttgtatgagggacattgggatttaccctctgcttcagcagtggtgtgtgaattgtggaaaggcaaatgtcctggaatagcagcaacctttttctgttcagaaggtcaaataagagatcacttcttcaggtggaattttccataggatggcaagcaaccatctgaggtagccccatgtatttagttctaatagaatgtgtactgagcctaggaataggaagattgttgagagagtaactctcctcagacagggacttcttatcttgtaagaatagcacccaaacaaggatggagccacaactctgtttcaaacgatggaaatggctatttgccatcaaagaaagcattgtgccagagaaatgagtttcttcaaactaaaaacccatgcttcttaattatctcagcaatggctgctcgtgtttctataaaccataaagacacaccatgcaaacaaggattgaagagacttccagagatgtgtgaaaagagctgtcgaagagtagtcctgtgtaagacagctctccccactctcagccctgatttaagcagtgtttgtgagatgattctctgctgtaaatatatttcccaccatgtgtgtcagatcaggcagaatcataaaatgctggctcacttattttgactctggttttcctaacagaggacagtacaagttaagttctttctttatacatatgtgttctaccttgtatatcctggctcctttccattaaatcctcggttctattgtcagtattaaattaaagtctacagtactatattgggcagccaatctttggagcttcaaatggttttggaatttttcacctaagtaagttccagtttaagcttttcatccatggttgaatctaggaccatttactggtcacattttgtaaaaacattaaccgttattgtccaaggttctttatacttatttgtactagaaatatattttcatatctgcatttttgtgctgatcctgtgataaagcccaggggtcatatagtagatagatgatttttttggaaaatgggctgactttctatttttcctattttttgtgagctattttaaaacagaacacctatgatttaaaaccattattgagaaggttcagtggaaaatttttgtattttgacttgtttattcctatctcactgatgtgcatgaacacattatttcaaaatttgtgaattgcttcaattctcaggtaacaattataaacaaatattttctttataaaaaatgtagtgaaaatgtaaatacccatgatttttaaggaaccagaaagaacaagtgacagttctgtttacttattttatctttagcttccaaagttgaagatggaacctagggccttgcacatgctgagcaaacttgttaccagtgagctacacctctagccctaatagttcttgtaaaagtggtttaggtccagggctctttgttccatggatatcatctcattctgccaagaggtcctttaggctgttgttaagatgtttttctcctggtggatttttttctcctgcaacttttggacagcttcaaactcttatttttcttctcactttcagaaggtttgttattaatttccttttcccatccaggtaggtttttgtgatagctttttttcttttttattcctgtctcctaggccacagctttgccttctcctcactttcttttctagtcctcatggccttgttccttcaagagttttctttcagaaatataactgaatagccagactttctatgaaagaaataataaaagccaccgtaacactatcaaccatctcacctgatgcttaagaggcacatatttttttttcctcacaattcattgagaacaaagtcttgacttttgcctgtgttttatgtgaccttcctagttctctagttccatcctttcttgtcttttctgctctacaccagccacatgggctttctggctgtttttcaaatgccccgagaatactctctcttctaaaaattttgtctacaagataaatttctgagtagccttttcatagtaaaatcacaaaaagttaaaatatttaataaaaatgtaaaaataacttaaaaggcagagttccagcttatgctgaaaacatgtttgtgtaactgtacgaggaactcctgtgtgaatgctcttacaagcatctccttttcttccagacattgggaagttggccctcaactgggcatcactttgtatttaatattagaaggacttaagtttgatttgatcaattatttgctttaatttctgagaagctgaacatctggcaccacggttactagcactgcattgtggaagacatattgggagaggaggttcgggggagatgggacacaagatagagagagagagagagagagagagagagagagagagagagaggaagagggagagagagagagtccatgacagacaatgttcaacttggtaatccagtgagtcttgttggggttattaagaagggtaatatgggtgaggggttacttacaaggagtgactatgactcataaaaagcaactgcatctctgtgaagcccacatcatggatgatgactcatgaaaaacagccctggagctctctgcacaactggcaggtagtaatatggtctcatgttctctttgtggtttaaatggccagtgtctcttcccacagccattgtttactcctgtttatactattgggtaggggtcattttgggaacattccaagttactgttatcatggacatgaactttggttttccttctgcttgcatgtttctcctttcctccaggatggagtgttacaatgcaaaggaaactgccctggccctttgcttccagggattaccctactggctgtagtgcgtagttactgtgtctggtggctgagggagaatgtgggaaaagtcaggttatcacatggttcacacaaaaggacattgagaccacaaataatccagaaggtaggataaggaagaataagaagcaggtgctgaaggtatccatgaccggaatgtacccatctcatggtacagagggaaaatagcaggagggaatgctgaaagtggaagctagctctagtcaggtattatgttttgaatcttctgtattttgtgttgctttgatatcttaggaaatttcaatctggtacagactgcccttcctagagctagcttttataacaatgaagagtgtggctgggagtacatgtctcttctactgattagcctgtccacagtgcatattctagccacatcagcctccttctatatgtagttttcccatactaagatactgattttgttagccctatggcatgtcagcaccagacacagagatgctaggtctgtagtcctgagtacactggttgccatggtgctatacacagtgaatgagtttgtatgccttagatatgacatgcagttttggtaaggattgttgttttgagcttgggtcttattttgcaatggcatcactgttgggttagaaggtatggacatttttgttctgtgatagggtgactttcagctgcgtagctatgtaggtatttgtgatgactgagacatacaaaatggacaccaggagaaataaagtggatgatgccacccccagtggatggatatttgctggcatagattatggagagatgaatgtcttctgtaaagggatggatattatgatcagctttggaggaagggtatgatctgtcacaactgtaagtttcttatgtaagaacaaaattacttgttgacagcacacacaaaataagagtagctgcatgctaataaaactttgtattttaaagatacagataccatgctgatgtagtaacttgccaattcttcttactattacacaaagccagtgattttagcccaaagaatgcaaattgacaaatatgtatcaatatgctagtagttagtgtgattcaactacaaataatattgttacaaggcactgtggcttcaatgatagctaatcaaatttcctattgtcttaggagactccatgaactttggctagtatcatgacctctttgacatacatatgtgacacagttacagtattacaagaggaatataatacatacatatattatccaataattatttgtttaaactactctgcatacgctctcaggtctcattaggcaacgtctcaaacctaagttaagagatggaacagggtaaaaaatttctacacatttatcatagaataatgatttcaatctttcttgagctggagtaatccagacccagatttaaattagaccacagaatcaccaatatttgaatgaattatagcacaattctgtttttaaaggtaagaaaggacattgaccagatgttgagatggagtagaagaaagggtttatattgaacagcatattacacttgaattagaattctattgtggaagttattagaggtggtttactttcctctgtttctaagggtttctttcattaaatcatatctcttaaagtgatttatatatttatatgaatgtggttaccaacacatgtatgcaagaggtgcatgcctgttggatccctgagaactagggttacaaaagttgtgagataacatatgggtactgagaatagaacccgggtcctcttcaagagcaacaagtgctcttaaccactgaaccatctctctaaccctgttaattcaaatctttagcaaaaggagaatagaatatgggccaagattcattccttcatctgttgattacagggtgtcactctctcttgttggagaaataggcagtgcctatctctgctaaaaatcctaaatattagttcataagagacacgtgtacttaaaaacattccttgatagtccataaggaacccttcaaataaggctgaggcagtcatatatgtgtccataacatccatgtgtagaaaccatccatgtgtgcatggtatcgttgtgtgcatactatttgatttttagtataacttttgaagataatttatggaaaagcaatttcattgaaataattcaattatctattttaatgttagcaagaatccagagaaccaattggtacttctatgttcaaaaattttctgctgaatgatttcacttaggcaggtgatttgcccatacaatcacatgggtgatgggtagagagagatgtaactgaaacctgattttccagcctctgtatgcgttgtaatctgcttcacagtgtgacagtgacagtcccatactaaaatgtctgcttcaaatatgtcatgtaggaatggctctgaatcaaattctgaaatttcctccctactcactaacccccagagaggatttttttttattttactttgagctcgataagctgacagtattggagttaaacaaatattcttaggtgaacctctgtgtcttatgttactttagagcagcagttctcaacctgtgggttacaaccccttgggtatcaaatgatcctttcttagaggtttcataaaaccattagaaaacacagatatttacattgtgatttataaccatagcaaaattacagttatgaagtagaaacaaaaataatcttatggttggggctcagcaaacatgaggaactgcattaagggggtccagcattaggaaggttgagaactacagctttagaagaattggcctgtggtctattataagtaaatccattcaagtgtttgtgttttgactcttccctttaattcctgatcttggaagtagctgatacccttatgtccataatttctatttagtacaaacaaattaagtacacagtcctgtcgtcatggattccagaattcacgtatggaaaagacaacagaatcagcaattaaaatagtatgtgacttatgcccccttcctgtgggaagtatgatgtacttgtgaacagagataatcctggacaggtcatcaaatgagcagacttgggacatgacaatagatactaaggaaagtaaagaaatagggatggggtttctccacagggctaatgaaaaaaggctcacaggcagggaagattgttgttgggagagctccctgcaggtcactaggtctggcattcaggaagactgaagatgtgatttaaatgaatattgactatagaatctgttctggggagcagctaaaacatcttcaactgcatacttgggcattataggccataacaggcttttaaaatagaacaacatgatataatttgtgagttagggaaactaatcttgctgcagaatagaaagaggaggccggatggataagattgaatatgacaccagcagccacagaatactttcaataaggaaaaaaatgatgaaatctttggttaatgcaggagaatatgggaaaagttagggctgtgatacatatatggacttagaatttgttataggtgatcagctttttggtgtaggaagtgagaaaaagaaatcaaaggcagctgttacatttttagttgattttcataaaaagatgaatctaccctttgatgtgtaatcataagatttggacccagcttgtgggaaaaatgaatttattttaagcacttgaaaacttagccaatggttgaatataggaggctagaatccagacggaagacctgaacctagagagagagctttgggaaatttcaacttcaggtaatttatgaacaggtaggagacaaaccagagactatctgaggagtaggtattagagatgtacagtgatgcagtttgaggtggtaaatttaaggagacagatacacaaatgaggcctcaaagagaactgagtaccatatgctaagaaggtggaggaataccaagagaatatggtgtccttgaaactaaggatagaacaaaattgtcaaaacacttctgtgagggcaaataagatgagaactgaaagggtccctgcatattttgagatagttttatttttatttacataaggaatgtgtaattattacataagtagcatgaacatatatattggtagaaatataaaaccatgtatataatttgtcacccctaattccatcaccctggataactactgttcaaatttgatacatctttccagactttttgtatatgcaaatatatgctctgcatcaaaatatatctatatataacaaaatgagttcatactgtaaaaatacagaatggtgcatgcatttgcttatcatcccctcaagaaatcatgataatctccacaacaatctgactttggtgtatcatctggctactcatatagggcccattaaatcaagccactgggggattatttgtaacattgcaaggctaattttgttagaagggagggcagaaaccagattgtggtgggctggaatatgagtaggcagtgaggaaatggaacagggattacactggctgctcaggaggcagcctatgaagagagagcagagaatgcctaaagtagaaagaggagtgtgctgacagtgtgtgtgtgtgnnnnnnnnnnnnnnnnnnnnnnnnnnnnnnnnnnnnnnnnnnnnnnnnnnnnnnnnnnnnnnnnnnnnnnnnnnnnnnnnnnnnnnnnnnnnnnnnnnnnnnnnnnnnnnnnnnnnnnnnnnnnnnnnnnnnnnnnnnnnnnnnnnnnnnnnnnnnnnnnnnnnnnnnnnnnnnnnnnnnnnnnnnnnnnnnnnnnnnnnnnnnnnnnnnnnnnnnnnnnnnnnnnnnnnnnnnnnnnnnnnnnnnnnnnnnnnnnnnnnnnnnnnnnnnnnnnnnnnnnnnnnnnnnnnnnnnnnnnnnnnnnnnnnnnnnnnnnnnnnnnnnnnnnnnnnnnnnnnnnnnnnnnnnnnnnnnnnnnnnnnnnnnnnnnnnnnnnnnnnnnnnnnnnnnnnnnnnnnnnnnnnnnnnnnnnnnnnnnnnnnnnnnnnnnnnnnnnnnnnnnnnnnnnnnnnnnnnnnnnnnnnnnnnnnnnnnnnnnnnnnnnnnnnnnnnnnnnnnnnnnnnnnnnnnnnnnnnnnnnnnnnnnnnnnnnnnnnnnnnnnnnnnnnnnnnnnnnnnnnnnnnnnnnnnnnnnnnnnnnnnnnnnnnnnnnnnnnnnnnnnnnnnnnnnnnnnnnnnnnnnnnnnnnnnnnnnnnnnnnnnnnnnnnnnnnnnnnnnnnnnnnnnnnnnnnnnnnnnnnnnnnnnnnnnnnnnnnnnnnnnnnnnnnnnnnnnnnnnnnnnnnnnnnnnnnnnnnnnnnnnnngtttgtttgtttgtttgttttttcgagacagggtttctctgtgtagctttggagcctatcctggcactcgctctggagaccaggctggcctcgaaatcacatcaatctgcctgcctctgcctcccgagtttgggattaaaggcatgtgccaccaatgcccggctaggtctagccttctttaacaagataaaattttagaaaatgtaaaaatttagctaccttacttaactgttagtattttagaatcacctatttttgagaagcttaagggaaaggtctattttccttcccaaagactcagggtttgtcaagatcttttgggtattttttgagaaatgtactggaaagacacaaattgcgattgaattttattagactttagattagtggctgtaaatatttgagttttagtttttctcattaaaattggagtcctgtcacagaagaccacagaacgtagaggctaatatgtaccattggggtactgctcaggagagaacatgttaccctgcattgctatcttgtgtacatgccagtcaaggagatcctggactcctgttccactctcttgtggaactacagtccacaagactagactttcctaaccagaatttgatgacaacatgtgcaactattagaaagtataataaactttgtcaatgatgagcagtcatcagtataatctctattactgcagaatataaaaatcatgaatttattggaaagtgttaactacctcaaaatgcataaccacaacagactcttacatttcctaaatgcagtggaacagatctagttttgtatttacagaaacagatctcccgaggcatttttaggttcacacactaactaagataaatgctgcagatgaccagaaggaaacttttatttttttttcctcttttaaacacaagaccctcaagattaatagggcaatttggcagtgggtatgcaagcacttctggtgttgaaatatcaatcctcacagtaaaccactgctaaataaatataattgctgtaatgcgttgtgacctttcaaatcctgtcaatcaatgggaagcatcaatgctagccctgttcagaaaaactagttgccatttgttataactagccatgtgtgtaaagaagtgctatgtgtttgtattcagttcagcaagcaagctactttaggccataaagcaggggcattagtcttaaatggtatccctatgagtttctgcaacccaaatccttactaagtcaccagcacaactgtggatttaactttgcctttaaaagtacaatatgagaatccacttgtgcttgcttcaaaatgcaaggtattatgtactaatgcagttttctcataaccactttgatgttcaatatagatcttaattatatatctttgtttttctatgaattatatttatcactactgtattctttcaactttcttccctggagctatttgaaggactttttttatagccttacctgtttgtttttgaacattttactgactggaactcaaaatggcatttattatttgctcattactttcttaagcagtctatacaacagagctccataaagatcttcaaaatgttgaggtctctctgattgactgtcctctgtctgcttcaaatatcctgtttgcctataaggatgggcatcttttgggatgactggccctagccatgcctctctgtgagaacccaattcttgagtggattccacttttattctagtattaattgctctgtctgttgctgagataaaatagctaatgaaagaaacttaaagaaagagcttgtttttgcttagagtgtaagagtacagcccatgatggcaaggaagacatggagacaggagaatgaggtgacatcacgcattgtatttgccattagaaagaggagaacaaatgaagaccagtgcttagcttgcatcttccttcattggtctagaactgcagaccagagtggtatcacccacatcctcccacctcagtccatcctctttagtaacctccttatcacagacatcctcacatttgcctactaggtaattctaactcctctcaaggtgacagggaatatcaaacatcaaagtgtttagagataacaaatcgaagatgaaactatgtgagtataattcaccttgatgtttccagtacctccttgtagggctttgcttgccttgggtagttacgcatatctacgaaatgaattatgtattgatagaggaattaaggaagagtcagaaggctttatatttaaatgatgtgttataggatgggacttatctgcttagaacaagaagtccattggcgttgaaaatcgtatttactcatcaatttacttattcatgaaagtgaaatctaaagtatactattgaatcaaagatctcatatttcttataagaatgttggcattaatttttaactcttatttgtatgtgcctacacacacacacacacacacacacacacacacacacacacacacacactcatgacataatatttacgtaccaactccagggcttaacttggtgtagctgattccctgatacccataacatttttaataaatggccaattctgtgctttccagtgtgaaggggcagaagctgtctcagatgggaatattgggaagagtcagaaaccatgtgctatcatgtggtgaagtaaaagatatatgaccatgtcagaaagtagagtgttggcttggtcataaagagtccttcgacttgttggagaaaagtattaagcaatccaagttccctctaaaggagcatttaggagaattagtttgtttgaattatatagtaaaaccaaagataacagggacagtttggaaagttttctgctgagttctgaaatatgaatgatgtgatttcattgaattgattacattgaaatgaatgtggaaaattaaaaatacaattgctgcacatggaattctaatttatggaaggttagagggacagtggataggttaattcctaaagtagttattctctgattaatttatttgaagttatttttggaccttaaatataatcccacaaaacgttatctagaatgccagtatctctggctttggttgtgtaatctgaatttggattgtgtaatctgaaatttggttgtgtattctgaattgcatgattaggactatgtaaaccttcgtcaatggatttggtttaagaatttctgttacatgtggagtgttggaggcttaacatatcatatagaagtagatgctactatctgtacttcatgtgcatctctagatgaatggaaagaaagctatactacaggaaaatatttgtttgtgtttccaatattaatataaataagattttcattgcaatgagaagccaggaaatgaactagacagacagtggaattcattttcaatttcagattactgactttctattaggatattcaggagtagtaaacttctatgaagttagtaaatcatttccgaatttatgagtacactattataagtctaaacatccactagaaaaccacataagcaaggtaaggacataggtagttctttttaatcgtcaacctctagattataaattattagtattacctttccaactaaaaacttgagagcatgtagcttacttctcctatcttctcccaatgaagttttacttcaagagaagaataaggaggctccaagaaagatacaatagttcaattccttttattttgttttttttctcataaatcattaaggcattgctttagcatgcagttgagctttgacatgaagtgttatatagatttttgaaattactcgaatgttatttttgttttgtagaattcttttagtattttgttaaaccctttgactttgccatcaacaaagaacctgcataaacctgggagggagtgttatacctcactttaacagtagcagattacttgcctcctttccccacaacaaagcaaagaatacctggaaattgcatatgatttcaattttgaatgggcatggtgacagatcctataattgcagcagctacttgcatctcaggttagctttcagttcactgatccagatctttgaatggctattatatagaggaccctgacggtttttatgcaaaggacaccttgttgtcaaagtaaggggatgtgtgtttaaaatgagcagaggttgtggaagaaggtaagcaagatatcactctactctcctgaatatggcctactctagcttagaatgccaggcatcctccctccctcccttccattcagaggtactgtcactggaacacaggtgtctgctaaaggttagcatacatttatctggcttagccacacctacagcaaaaaccttttgaaaaagatacttggatatgaaagtttcttttcgttataaacaaactagaactattacaatattccatataatataattagaaaaccctttttatagtcaccatataagggaagatgttacatcaaaggcaactggaaatgatatgatattgccttaataattcttgaagatggtttctagccaggtgtggaagtctggtctggaaacttgatacaagtacaaattctcaaccccagctaactgtcgtgaatcagaagcactcctcaagggttataataatctgtgtataaatgtttccccaggtgagttttaaggaaaaggcaagtttgaaaaccatttgtgattatttcctctcatgtcaatgaaactgtgccagaaacttggttgcttatagccacctacatttattatctcttattgacagagttaaaaggctcggatgcatttcactggtgtctcttcttagggacttcacagtctcagaatctcataaggtttcaaagtgttgttgagaacagaagacagactggatgggcagctcagggcagaaacccccaacacagcagtttcaaaatgcctccggttctcaggccagaaatgctagaagggagcactgttttcttacctcctaagtgagcaccctgtgtggaggctatatgtgatgctgggcagtaaaattctagttctgatattaaccccttctagtgaacagctttggaatctgggtcttagattttctttttaaagtgggttacatctatgccccagtttcagccatctcttacactatgtgacagttactgcttcagagtggaaaatattacagtaatgtggaatctaccaataggtggagacaagccaatgtctgcttccttaagagttaatccaaatgagcagttcaggcacctgtctaaaggactactgtcaggaatgcagatctacacattaatctatgctaaagctatgggaggaaagttggagaggtggtcagtggtgaagagcattggctgctcttttaaaggatgcaggtttgattctcagcacctacatgatagttcataccacctttatcttcactgccagggagtcctttgacttgtggccccagtgagctagctaaaagcaggcatgtggtaaacagacatacatacaggtaaaacacccatacatataaaaatgaattttaaaagacaggaataataattagttcttcgatgaaacaatgtaatattccttcccaaaatgccccacccacacacccacccacaatattttgtagacactgtgttgcttagctgggtctccttgcctctttgactcctgactcaggaaggggtagtttttcccttttcttctcttcttgtccttttggatactagccagagcttatgcacgtcctgtctctggtagtttgcatttttcggtgtttctctagagctgccctctggcaagaagtgtgcttccttgtccaccatatatctaacttccacactggcttacctcaagggctgttggttttgtttgttttggtttttcttttcttctactaatctccattgtccttctcagaacagctgacaagaattccagattgtctgctgtttgtttgcttgtttgttttgtttttaagcctaataaatttgtcctcaggcttctcttgagtttgttcttaaatcattttattagtgagattacgactcaaagagggcaggcatgtttcttcagtgttatctggcaacgatgaagggagccccaaatctttcacgtagcacaaggtatagtggatgtcaacagctttgcattcttctctagggccacacacaagactcagtgacataaactgtaaattcaagacacttaaggttgacatattatggccatgagctacttctttgactgtgctatgtcttcagtttccctttccacaatgtgtggtagtagcaccaacatcccattaaactatatgattattccctaaattacctacatgttcattatcttcaaaacctatttattatattctttacattaacttatacattttctagtattgcttctggggaaatgctgaaaactttgagaggtgttctcttacatatttttccattaaagtctgagttcttaggctcttgtcttgcaaaatttccagttttgctcttatcccagtacacgaattgatgactaggatcaaattcttataagtactgcaaagaagaaaatacatcacttttgcacccataatgattccgttaattttcagaacaaatccattcccaaccaaatgttactatccttgtttaccaggtgacagccagaatcttaaattaataagctgacttttccaaatatgtgtacagttagttatggtcacatctgtctaataaggatagatattatttgtttttattttcactttaacttacacaccagcagaagctagcctgtcctataaaaagatcttttggaattcactagtgaatggtgatcagaaagacttgatgatttgagactgaggctggaggcatataaatggaaagcaggttggggcaggcacttagataattaggaagcagtgtgattatcaaaagaacattacaatgaaaaaaggggtggggcaggggtttataggcaatttccaggaagattcataaagaggatacctacaaggaatgatgcatatcattaacctacaggacacttgaaagcatgccatggagcagctaaactcaaggtggatttttttttttttttttccggtcaggactccatccttggaaacaaggcacatgaccctctcttcctacagggatctcttctccttttggctttgcagttttcttaatctttatttttctattgtgagtaacaaagaactgctgacctaagcctcttttttaccactatagatattccactttatcaaaaagactaccagatgggctatgtgatcaccatttatggatatgcaactcaatattttaaggagaaaaatcatctcagatatgaaatgtgttgcttggaattttctcttgattttctataactctaatgtggaaaggaaggcagcccatcatcttgcaacttgctttttaaacatttcagagcttatgtccattgtatatggtattgtttcacctgcaacaatgcttaaacgagcatatacattgagcatattcttcccaatatgcctctctaccattccttccttgtccctccctgattctaattagtcctcctttcttcctactcagatacatgtcctatacacatgcacgattttatgcatctatgataaacctagcaaccacacatgaaagaaaatatacgatatttgttactgttctcactctgtatttgaagactccctgggaagtaaaataagattcctgttattcaaatcaataagaaacaaaattacttcctaaacagtcttttgtggacataatatagtgtgttaattatagaattgacactgaaatgatgaaggtgactgagactacaaacttggtgttttcttttgtgcttgaataagataactcactcaaacacaggcagatgatgctggagctctagctcccaaaattttgagatttgatcttgctagatgagtcttttcttgaatatttattgtcctattcctattggtgatgaaaatacatattatattttgggaaaataattactattaataaaaataacgaatgtttctagaaatattggtacacatcttatcccttaaggtccttaacagagaccttgtgaagtacatgtgaccatgatttttacttgaggaatatgaggctaagaaaagacaaatgattggacatttttcccaagctgaatagttgctaggcattaattcaaaaactctatgtgacatcattgtgttagctagctgctgcataatcacccatggcaaagacttgctgatatgtgatgtgtaaaaataactatgatctatctcatcacaatggtttttctgaggttgcctgaccagacttgctatagctaagcatggcagcctggctgggggtatgacttccccagtcctttttctttggttgtcatgggcaaaatgcagcagcacaatgggggatttctagctaggaaacttgactgtagacagttggctgggaagcattcacaatgcaaattccacactagcaaccaggggtggaaggaagaactaaatcttgagaattattttctgacttccacacaggcactgtggcaggcatgtgcctgcaagcacacaaagaggattaattagttaattaattaattaatgaaaacaaaaccccaacgtccagtttacatgaagtcactgggttttgtgattacctattagattatcaatcatggctatcaacatggtgcactgggaagagggaaccacacctgaagaattacctctgtcagactggaatgtgggtgtgtctatggggcattttgtttatttctaattgatagcaggagggctcagttcattataggtactgatatctatagaagagtggacctggattgtataagaaggggagctgactttgagcctggaagccagccagccagcaaccttcctctgtggtttctccttcaggcttttggcttgtgatcctgacttggcagcctttgatggtgaactatgacctgtaagctcacataaaatattcccttcacaaaatgctttttctcaggatgtttttcacaggaacataaaaacaaaatcaggacagatacttcataaatcctgaatgtcccagtaggatgatgtcctcagcaagagtcagccatattgaatatgtcatggagcagatgaccacttgtcaagtcccatgtactaactatacttatgtcttgcaggcatgtttcagcttatagcccttaagtctcatttgccctggacaaagatgatcaacaataagtcataaactcactaccttatggaaacatgatttttatatcaatgttgattacttcattattcatttctccaatgagtactttgtaaatgacagcaatgtaaaaaggttggcggtgtctgcttaattcttctcttctgtgtcttcccctgtgccattagaactccagaagtggaagccaattggtgaacctagaaaactatgggcatgatgactcaactataatttttttatggtttcatgacatgtcaactggccatacattctctcttgaagtgtttcattataagaacagtctatattgtatagaacagtggtactcagaaaaacaaggcaaatatgttcattgtagaaatagtatatctccactattaaaaatgaaaaagacaatcttacctttactggaggctcagtggctggctctgttagatcctcttcagggctagcccaaatggagtctcaaatagtaatattctggacccagctctgtctccacttccaaatgtttccgcccttttgctacctttatagtaaacagtgtaagcatcttggtagtgcagaagttattctgccgagaccctcttgtctagccctttcattatcagactaagaaagagacagtagaccctaaggaactggaatttctccaggactctcctattgggagaagcaataaactgaaacctggtgccagccggtgttcaagtttgactactacaagagatttcatacagtggtgacaacttgtcaaaagagcttgtaggtgagactgaattccagacaatggtgatgggctgaaccacattttgactagaactatttggaagtgcaaatttcttgtccactgtttaaagcctacctctcgtgataacagtctgcaggtggacctgctgtatatgtcactttgttctcagccaccttaccctggtttcacctctcacttttatgcattctctatatttatgtgtttaattcactttttgaggacaggtggttgctcccagcttgttaggacagccagggacaggcatcaactctaactactccagtaacgacaccatgcttaggaaaagcagtattgcagtctcctcttaatgaatttataacatgtcaacttttctcatttttgtgacaatatgacctgtgtagcaaagcaatgattgaggtttatccctaggggaatacgttgagtgatttgacaagcaactcttcttttatgtttagaataagaatatccctgtgaccttcaggactgggttgtgactaactctgcttctcagctcacagaatgctttgagttctgctcaggagcatttatttctcttttctgtttgaagccaggtcagtggatctgaggtgactgtgctagcatttttggttctcaccccagcacttttttttcctgtgtattactttataaagttctatattggaacacccataaaggactctgtgtgccttccttgatctgacaacttatataactagcatggccatcttacaaaggaaaccctctgtttaattggtgtgggttgcatacacatgtacatatgtttgtacacattctggtggaggctcgagagcagctgtgcctggtatttatctcagatgctgaacatcctgtctgtttttaacaagtgtggttattttcatgtgaatgtgaatgcaggtgcattagtaaagatatgtactatacatatgatatgcaagagtctgcaaatgacagagggcctcagattccctagaactgtgcttacaggctgttgaaaaatgcctgctgtaggtgctgtgaactgaattctagtcctctgctagagcagtaacaatctctccctacatcttgtttgtttatggtttgtttgtttgtttgtttttgaggcagtttctcttacttttacctagagctagtcaaagtaactaggttgtctaaccagcaatttcctaagatatacctacttcaacctaccagcttgagataacaaactcaggtcaccttggctgacattttagatggctactttgtatccagcttatcccagcctacgtctttcatgattacttcagcatcatagaaaactgacttcaacacttctggtctggctttctcacggggattttcttatcatcactgctacaccattaagtgtcctattagaatttgaaaaacaattctcatactagtcctccacatgctggacttggtgctaaccactgaactaggatcacttgtgatagtctaaggatacttttgtgtctttaaatcagactatcagactgttgagacaaggaaccccaaagaaatgggaatttccccaggagtttcatgacagtagaaggaaaattaacagtcagagtcttggaaataaatttcacacagttctaacaaattgcctggccaccttaacagaatgagattgaagttcagacaatgatggacaaaagtggatgggcccacaccttgacctggactgcttagaggtggatatctgtggacctctacttacacttttgccccattttagaattcctggatctctttaggagcacaggatctctctgtccctctttctaacatggcctcagtaataaaatcatccctccactcccgggtgtttaattggcttcttgagtacagatggctgaatttggcttcttgtggcagaggctatgacaccaaatttggtaacaatatcagtgcaacaaaaaggtatcaaaacatatgccgggagcttctggcatccttaccactgtacagcaggagaagtcccatgcccagctgcagaataccctgcctgtcagcactgcctgtggcagttgctagtgtgaatggggaaattgtaaagtgtctgcatgtttctttgcaccagcagcatgggagtgccagctattgttgttgtaaaggaacccagttctaaatctgtgtacttggatcgctgtgctcagtttatttagaacatggcatttggagagagataaaataccagcacactgtgcctttgccttttcttattttcttgagcaatttggctgggtctttttgccagacaattagctagttgtgggatataggagggagggatcttgaagaagaatgttatcatgatgcccactgtgatagacctttgtagtgttaatttgagtaggaataatcatctgtattgatttataaggatggaattgagttgtgactttgattcaaagaagaaagcaggcatgaacagtttgatttatggtagtattaaggcaaatatttcagattcagtttctgcagtctaaagttgcctgtctggtgtttacatgtcagaatacattcagcaatttcttgatgagaaatataccccagatggaatctgtaatttatttttgaggccagagttctcagctatattttgtgctgacctcttggagattggagaggaagcaacctgggactcaatcattcatatctgagagtgggttgatttggaaagagatgaataggcttatgagaaactgatggtttataaccatgcagattaccttgattctggatatagtgctgattttcaactatgaaaatttactgcatttataaggtatctttcctacttgagtgatggaaactattgtcctaaagtgtatgatatcctgaagtttcagttaagaagaaaactgccaagtggccttttgaaatgccttggctcatgcaatttgtgaccataacgaatatacttttattcacagtcactctttgtatgtctctccactatggctgtaatgacactttcccaattctccaagttctggttgtgcttttgacaatatttgccacaccaagacataattctctgccttggccatgtttagtttcaaagcataagttgcatgaggtcaagataaaagcctttgtctgaagatggcagatgaatccttactaaacactaaatgaatgacatgtttctgtagtgtcagggtcttgaaatttcttggatgtgggttcaagagggacacggatacacatggttgtgggtaaggatgttattagaagagttattcatgtcatagacaggcaggcacagacaataacatggcaggtgctcggcagagagttgaaggttcagcaccaaagacagacagaatggtaggggctttgcagaagggaatcataacccatgaggcagaagcatggacacatattcatgctgtctaatagaggtggtttcataacaagaaactgaagccagactcttggttcttaagcagcaagcagggaaaggggtgaaaaagtaggatgtttgactaccaacgttccctttgatgtcatctcacttccccaggtattgtagtttatattatttgtcactttgacacacctgagaagagggaatcttaattgcaaatttgtccctaccagatagatccctacttatgcttcgggggcattttcttgatttttaattgatatgaggtagtctaacccactgttggtgttgctgacagggaagtaatcctgagctatatagaaaagatattgaaaactgaatcaggatcaagccaataagcaatattcctctgcggtttctctgtcaaggtcctgccttgcattctcatcttgacttcacttgatgatggatagcatgtaatatggaataaatgtcttcttgctgaagttacctttggtcatagtatttagtcacagcattagaaagtaaactagaacactggataagatatccagtacttggaagcttgtctacctagagactacccagacatggcccaagtaagctacctatcagtatctgggagtgaaagtctgctgccggtattgtgttcttacagatcctacctgtcacgtcttgatatacactggaatgctaaggaatcttccaaaatatctcagttccaagaatttcacaacacagtactggctctggtttctcatccttgatctttcagagttgtacctaaaacaatcttcaagcaccttagaggattgggtgacatactcatttttgaacaccatggtcatagcaaatgtccttgaatgttctttctaatggatattgtatgttcctgcagggagcatgacttcggcaacttcacctatcattttaaaatgggatccaaaaagtttggaaatccggacactcacagtggaaaggctgttggagccactagtgacacaggtaaggggtttgttactatgtatgattccttggtgatttccatgaacctatgaggactgtggaagtcttaaagaggatgcatcatgccatcatgctgattactaagtaaatattatttccccagctgtgaactgtctcattgccttgtatcacttaaagtagcttttgagcaattttttttaaaatgaagttgttgagataattaaagagagggcccttggtgaagagagccctcaattgcaacaccggatggattcattgtctaaatgagccattcctcattcacttgcagattcgaatgcatagggaaaaacttttgactgtttcctagcagtgaatatttatttaatcactttcctctctgtttcctggggcaaacttcatcctattagaattggggggttgcttcatttgggggttggtacatttccacaaggtgaatgtcaagggcacagaatgtcatcaggttttagatgttgacaattaatgtatagtgtctcatgaatcatgtcctcagcgatctgcactcttaagttcctacgatatgaaaatgtgaactttttatgatgcatttgtagagattcattatgccacatgaagcttgaggctatttttattggtttgtgctagatgctttaacaaattaccatcaagttaatggcttcaagcaacatagatttattgtttgatggttttagaggtcagaaaatttaatgtcaaggcattggcagtgctgcactctcattggatacttgagtagaaaatcatgcccttgctttttctagcttctagaagcctcttgccttctggggcctcttccaatatgtttgaggtcagcattatagcatctgtgcatttcttttccttatctctgctttattcatgtatgctctcttagagcgaacctcttaggctctattatgttgagcctactcaaatataccagaaaaatttctacatttgcatttttttaacctaattgtgtctttaaagtccttttgctatttaaggtaacatacttagtttccatgaatagaaggtagctgttttgagaggactggggtgtgtcattcactgtaacgtgacttgattgtgtcctccccatgtgcgaaatattttcattaagtccccaagttactcaaaatctcaaatattatagcatcaattacatttcaaaatctcactctgtattgcctttaaagcctccagtctcatgtgagccctttagggataagtcaagtgaagttgttccacaccagtgagcaaggcatagtcttcgggtaaaagagacagacaatcttagttacagacatcacaattccagaagcaagggagtacaagaataaactttgccagcctcaagtgtagagcttcctctgggcaagtgttactagactctaagtcctgtgagcaaccctctggggcttgagaacctgccccttgagccacttctttttcatggctccctggccatattgttcctgttcatatgtgatcatagtttctggaggtcaaatttgggggacctaatccgcccattgatgtctaccttttaagtccaagcttttaaccatttcaagaatctttagtttaccatttgtacctgtgataattcattccgttgaacaatttcctctagaaagtctttttttcgatattcccatgtgcaggccccagtcacaatggctaaggtaaccccatgtcacacaactagggtttccacatcaccctttacttactgaatactttaaagtgtgtattcatataagggactagcaaacggccatcaggtcatacattagactgcctctcttattaaatgaagaatcttatgttttgggagtggagttgataacgtaataaccctcgaggaatgagatttattagaagaaaggcctttgtatctctgtttgtaatctcttgcatgtttttagtaactagacaggagaaatgaagccattccttcatggctttgcttagaaatatcttcagttaaatatctatgcttatcactgttctagtttcctcataattattctgttactctctaacaaacttttcttttcctctgctttacaacaccgtgcttctgaattctttctgagcccctgctaatgtcatctttgatggttatatttcttaaaagactctttatggtgatttgggtcagtcttcaagatgacaaacattgtctgcaccatgttcctggtgttttgaactatcaccattgggcttttatagacatacttaagaaacaaacacgcaaaacaaagcaaaataacccaaaaccttcaaacaaggaaatcagtgattgcaatatcacatttattcattgtgtgtcagggcatggaagctggaagtcagagggcagcatttgagagttaattctctccttctaccttctggggtctggggatggaactcaggtcatgaccttgctggcaagtagctttacctgtagacctatctcactgatacaagaaggtttattattattgattattattgctaattattattatttatgctcctcatgcttctttcattcattgtcttcctctaatcaatctgaagactacataaaagccctactttccaaagaaaggatctattagtttccagttgctgctgccataatttactactgttttaccctgtagtttaaagactacagatactattacatcacagttctgagatgagaagtcctagtatcagggtgtttgtagggctgcatttcttgaggatttttacaatgtaggctccacattttacatttattaatgtgagggactcatctgttgcctctctttgcctcacctccctccatctccagagccggcagccttgccagccccaaataacgtcctgtgaccaacgttcagaggatctcctctgctgatcttcaatcctcctgcatctattttatgaggttctggtgaccacatgccccaagatgctctaaccatccgcatagctattttcccacttcagttaatatattccctagacccttatgtgtttttgatcaaatatttcctgtgtattttcaacttgtttacgattcctgctggttctttgatcgtatgctgactccctactcagcttgtgttctgtgaatgagagtcagttgatgaaatgttggttagtgggtgacagtcagaacaaagtaaacaatgggacatttttataatcacttgatagagtggttttgtcctttaagtataaacacaaatttggccttgcattttaatttttaatactaaattactcttttcattatgtttaatggaaaggtttttgtgaggtactagaatcagtcgacctattgttcgaggtgtgtgtgtagagggctactttaggagatacctttgaaacaagagaagactggcctcacatgatcctccatgaaagcaagtatacctttttccggccttttaaatgctcccttcattatatacataccggtaatatttagcttatggactaaatgtaatgaagtattaaaacatagtacttagtattatgtaaatggtgaatgaatgtagttttctctttttcctactgttatatatatatatatatatatatatatatatattcattttcatataaaccaataatgagaagtatggcattatgtgatattgtagagaagtaaaattatgtggacttttaattgttaaaaatttcaactttgttttgctctgaacttagtccatctcaaaacatcttctgttggataaaatcagtgattcagaaaggatcatattattatagacactgtttgacattagagggatttagctctgcagctaaccacaatgtccatcaagtacctccaatgtctgcaagctttaacttgcatgctacaagtttgtaaaaatgcttccatacatgctgttgctaagctggattttttttttaatttaatagcatgtagagaaacacactaagctcatgaatgaaccctttaaattcaactgacaggattgctggttcttggggcacttaagaaagacaaaagagacataaaacattaggtgtaaattccataactgatgtttaaagaaaaatgtagaagacagagaaaaaaatgaatcacagcaccagttgtatcaagtgcatgcgtacaacttcatgaataaaatattgttcattggaaaattgaatgccctgggaacacgttttactgcctcacacttttttgagagctttgataatagctgaaacaaacaacaaaaagaagtcagtgtgctcagagtcagttccttcactttaataagaaagatgacattgagaatttgctattgacagacatttaaatattatggtaattgttgcctaatatgaattaacatgtgtatgacatatatttgtctgaaagtgttgtgatggaaagattatttatggagaaattttgcataatttttaaaaattatttatttttttttgtttgcccagacagggtttctctgtggctttggagcctgtcctggaactagctcttgtagaccaggctggtgttggactctcagaggtccacctgcctctgcctcccgagtgctgggaataaaggcatgcaccaccaacacccggctgtaattttgcataatttaaatcctgaaataattgatctagtgaacttctgtcattgtggaagaggcctgaacttgatgtaaatggaaatattgaggagtttagttgactgcattctgtgacaataagtgctattatgaatcaaaaatactttgctcagtaactttatgagaaaaatcatatgtacatgtacacacatatgtacacagggtatgcatctgtattaaagaactctcagatactttttagcaaaattatagataatatgtaacttaatgcgaaacactcatccttcccatccaagtcataaactcccattagtagctacatttactataccatggtagcattaaatgtgtttaatatttttatttgttttgctaactagtattttatctctgtatgttatgtttctgtgcgggtatacctgtgtgcagtgcctgccgaggccataagagggtgtggggtggcttgatgctggagttactggcagttgggaactgcctggtgtgggtggggacaattgaactcgggtcctttgaaagagcaacaagtgctctttcgcaccaagtttcctctccaaatctctccattacttttaagaagatttttttaaagaggcctcaagtttcccctttaaagaattagaataaaaaggatatttaaagacactaaaaaaaaaaaaaacagaatttaatgactgtgaaactagaactgcaagaatagaatacaagagtaaaataactgtgatgagtacaaattctattcttctctaatgtgccaaagaaacctcttctcaagggacagggacaatgaaaagggaggaatgaggagtggactttgggagcccatcccacacggagcctagacgcattggggtgggcctaggcactatcccaaaggatatggcagactytgaagaccgcctatggaaggcctcaccctttctggggagcagaaagtgtatggggataggtaggatgttagttggagggggggcgttgaaggggagaaggggagggaaagggaactgggattgacgtgtaaaacaatcttgtttctaattcaaattttacaaaatggagaaaaaaataaattaaaaaaaagagctgggcgttggtggcgcacacctttaatcccagcactagggaggcagaggcaggtggatctctgtgagttcgaggccagcctggtctccagagctagtgccaggatcggctccaaagctacacagagaaacctgtctcgaaaaaccaaaataaataaataaataaataaataaataaataaataaataaataaaattaagagagaggaaatcaggtgagaaggagagagatgacaggaagcccaggagaactaactccacctgtcactccccattgcagctgccagaacacctgagggaacggaacgtgtgtgttaagtaacatcacagctacccaaagatacccaagagcaggtggaatgctggcgtaaaccatataaacatgggaaatctgtttaaagataggttcctatcaaaaaaagcaccagaacagatggattcctagatgaatattagttgcactttcaatggaaaaaaatgaaagattcatttttattctagagctttatgaaccacgcctaattgcagaagtgaaagtaacattcagaaacaaagcccccctctgactcaaggcatctgtcccatcctccttcccctctataacatactgcctcttcttaacaattaacactatttaataatttatgtataatgtgaccaaaatataacaatataaaaggggtcacattgcttcctcctctgtatccttttccatttatctaaagaatgtaagtattgataagcttctttattcatgatttagtataagaatcacagattaatagatttgggtggtttctatggcaacactacaagttattagcagctgtgcatgcatttctgtcaaagaactgaatggggtatgggatggcagtaacaacatatgatgaggaaggggtctcttcaaggagttctttttgatattttttttgtatagtgtttttttcaacctgttttgaagtatttcacacatttatggttaactgagtattttcttactagattctattttcagttttggatggtgttttcttgttcataaatgctagttttctgcttttatgttgaattgaagttgtatgtgcctgaatcacataaaatcctgtaaggatttttgatacttctataacgtttcttcttaattatatgcatgtataaatataaactaatagcaggacttgaatacaagttacttggccataatttggagagttatctttattacttatattaggattttactgaatgactatgtaaaatttagtgccttacagatagtttcatctctaaatgtcaactgtcaagttgctatgttttcccaggaaatgacaaaaaaatctcaggtcctattgaagttcttgtttgaattgaggtctcagggcagattgtgagacagtcattgataggaattgaattgatgactatgtaatctagagtcagattaatttctgttaggggattgggctcaatattttaatgtgtgccaccagatgggagtgatgctctttcagtaatgtgaccagctgtgttggccctattttgaaacttgattaatacattaagccgttttaaacacacacacacacacacacacacacacacacacacacacgagagagagagagagagagagagagagagagagagagagagattttaaagtaatacactattaaagatgtaaaattatgtaaggcatgtttttctgcaaataatttttgcagaataaatacaatataaaactagtttcaacccagcattaattgcactgatggtatttttcagtgacataatcattgcacatgataaaatgtattagtgtaaccctatctaagttgtttgtttgacatacacacataccaccctgaagtacagtaggagtcctccctctccctactgttagagacagctgctttcaatcacagatatccaaagcactgtggtgtgatttcactgtgcatggcatacatataccctctgttaactggcaccatctgcccattgccttttctaggaaatccagacttaatcagtaaaccattatcatggtttgagacgacaaactaactctcttaatggtgacacaactgaattctcttatactataatatgtatttgcaataatctctggaataggtgcagtcattatattttatgttaatgaaatcatagtaaaagtctcatccctagacaaaaaaatataataactattaactggagagagagagaagatacttaaaccaaaggaaaagatgctgtcagtctgagagtgggggccatgcaaaatgaagggtttagacagaaggtaagcctggaggaggaaaaaggaatgagaaaagcagtgcaattatattttaatttaaatgtatataatttttaaaaagagatcaaaagtatcaagcaatgtgatgtgaatatacttaattaatatatcgcttcacttagtaattcctctactttaactgtgaatgtatttgtgttttgtttttccctctgcttctagaggatcagctgattcaattctgatctccctctttctctctccagctcctcaccccatatattgtaggctatgtgcttctctgtatgtgcatgcatgtgtgtttggccggatgagggtgagaggcagatgctggatgtcttccccagtctgactgactgttcagcaagctccctagagtttggctgaagacaaggtttactgtaacatgtgtgctggggattcaaacctagttcttaatgcttgtaccaccagtactttacaagctgaaccatttccctacctctctatcctgatttctcttacaagtgaagtcctcacagggcctggcccgaggtcagaactaaatgtcctgagtcatttccattagactcttgggcatgttttgaagtctctactgctctgaacttacaaggaactcccctccatgactatgcagctaattcccgaaaaagcagaaaactactcttccagatctcatgaggcttctaggcattgttacttacttaattttctgattcagtaaagtaaatattatatttgcatctggtagcaagacttgaacaatgcaagacctgagcatttagaagaagctcaatattgagctaaaatgggttgtgcggaaacagagctgaaaatactgatgtgctgaggatgtcattcacaggggaggacccacgtgcaagtggaaaggctgggggttaaaattcagagctgagagggaggaaacggagacagaagaacataccacacaataaaagcagtaccaagagtgagactgtaactctcagtgttagagctcttacgtgggaaagacagtctaccttctcttgtttgtgttaattctgataaaagcctgctgcttgctgacatgcatccatttgtaaacacattcctcagcctgcaaatgaacaagttaaattggaaaaaaaatctgtatttttattcaatggttagtgtgtatgaaatgctcagttttgcaaaatctctttcatttggtttaacaatacaatcaagctgttaaaattatttctcttcaggttttttttttaatttgactacttcagtgaatattttcaatgggaaaacagaatttaaatttataagtgaaactcctgtcaaagaagaataatgttttatgtgtttgaaatgagatcattaatgaaattttatgtgatattatccaataatttcaagggacaaattatttgaggttagcaatcaaaatgactctgcttaagatggtacagaaaccttacctgaactaggcataagaaggaagaaaagaaagaaaaggggaatgcctctggaatgcttgcattccaccagaaatacctctactggcaaaccaattaaagcatggcaggtgcctgagctaaaggtgaaagacaagtcagctggactcttttacctatttcagatctgctgctgaaactgtaacatgtacactttgctttcacacacttcaggagagaaacacagtaaaaaaccctggaaaaacaaaccacttattattctgataataaaactctcaattctagtgccactgatatcccagtttggtgggctaccctttttaaagatttatttttttatttgtgttgtatgggtttgtgtgagtgcatgcttgagtgtgtgtgtgtgtgtgtgtgtgtgtgtgtgtgtgtgtgtgtgtgtttgatacctgatccagcaaaagctataaaagtgtgtcagatctcttgaagctggtgctacaagtgcttgtaagctgtctgttacaaatgctgggaccccaactcgggtctattggaaaagtagcaaaccctttagcatccaggccattatccagaccctcttcatggggttcttatcttccccagaggctgtgtctccttcctctttgattaactttgattctctctacacattttatattctagatgtcgggtctttcatcttggaattcctttcctctttctccattttcttccctgtggattctattctccattgcagttttcattgtaacacatatgctgagagcagagttccatttcagcccacctgaaacagctcattagagaggttagctgtgccccactctttctgaaatcatcctggttttcttcaatccttatggcacaggacccattccaaatcatcccatgcctctcttttggtgtccacaactgtcatataaatcatgcagcaacagggtcttctttcctaccatcctgtctctacacgagatgcagattcagcattggcgacaatgaataactttatcatatccctaccctttttaagaagctacacttgttttaggataaagtgaaaatacagtaagtatatcctgagttgagtgcagcattcgtcacccagctcttagtaacctgactcaagcctgagggcccttctgtcaatgtcttggacagtggagacatggctccatctctatatgagaataatatcatttgcttggatcgcccttttagagcaattttgtgctctgatgtcaatgagactgagaacattcctttcccttttctcactttctgtccccctctccctcctttccctgtctcttctttcctattcactccttctgtactccattctcatctctgttcatgtcccctccttttccttcttcccttccttctcaccctcatctttgtttctgaatattgcccccatctgttcttgtcttatggactagaatatggtctctctggcttctgcactggatggacagcttcttgaggataaggatgacatcagtccaattctcacattcatttccactgccagggccatagaaagttgtgggcgattaaataaaatcctctctttaaaatatgcaatacagacatttcgttttgtcttcttcattctgccagaattagcaagcagtaaaaagtggttacatacatactgtagtgcatgtttcatgaagatactggtatttttgcttgtcatgtgatatttaaatgagtgataatggggtaacttttatctgtatannnnnnnnnnnnnnnnnnnnnnnnnnnnnnnnnnnnnnnnnnnnnnnnnnnnnnnnnnnnnnnnnnnnnnnnnnnnnnnnnnnnnnnnnnnnnnnnnnnnnnnnnnnnnnnnnnnnnnnnnnnnnntatatatattggtatgggtgtgatggttttgtcctttcacaaaaaagattgatgagtcttttcagaattcctatatataatatgtatcttcattagaaattaagtttatttattactatttttaaacagaagtatgctggggctgaagaggtagcccaggtagcagttgttactcaactctttttttatttttggtttttcaagacagggtttctctaacagtcctggccattctggaactcactttgtagaccaggctggcctcaaactagaagtcacagacatctgtttgcctctactgggattaaaggtgtgcactgccactgccaatctgccctcgttgctctttagaagaccacctttagttcccagaacccacatgtgcctcccagtcatcactcacttgaattccaggagatgtaatggactcttctgacttgtgcaggcaccagacatcaatatagtacacatacatgctttcaggagaaacactcttactcataaaataaaatcagtatcttttaaaaattaaaaggaagtttcctcttccaaaataactgtttgaaggtgtgtatgggctttaaatatgatatttaaaatagtcttcattaaagcttactaaaagactatgaacttcccttttgtcaaactggtatacaaatactaattccatgcacacatattttcactgctcccacccatagtctatgtgtgtatgtgatgtacatgtttgcatcggcttgtggatgagcacgtgcctgagatatcacgttgtcctcattcactcatccaccttactaatgtggcagcctctctctgtcaatctcagagctcactgatctggctaacctttctactttggggatcacctatgtctttcacccgaggtttgtattatagccaagctaccataaacacctgacatacatgtgggttccatggatacagattccgatcctcaagcttgcagataaaggaagggcttgcccattcggcaatgccctgctccattttcacttcggagttatgtggctgggtaaccatatagagcttcccctttctacctcctggacacagcaaccgtgcttacaagtagaaattcaagacagctaaataaagttgactttccaagaaaaaaaaaaagtgtgtcccacaggattatgccacattagagacattcattcttacaatatttttattattatgccagctctaaatgagagttgattttattgataatttgtaaattttaggtatgtttacttttacatttttagcaacgctggaaaggagagccagagataccagtgttttgttttgttttgttttgttttttcccaacaccatattcttgctggagatacaactcaatggtaaaagctggttgggcatgcagatagccatatgtatgaaaacttagtaaagtaaaagtaaatcaagttcaaaggcttttctaacacatttcctaattctgtttggttttctctcttgtgacttctgccatgacttcatgtctcaatcaaaagagcttttgaggtagaactcagaggtgtctaagttcacatgcaggtagggactctgtcctggtccctgacactggctggtgcctgtgtgtcctttaggaatagccatcctcacatgccactgtctctggcattttaaagattcatttttgtttaatggtttattattttgtctgcatgtatgtatgtgtgccatgtgtgtgcctggcatctgtgtagtcctgaagagggcactagattcactgaaactgaagtttaggatggctcaaatcccatcatttggacaatgggcatcaaaccaggttctatgaaagagctgcgagtgctcataactgctaagccatctctccaacctgacatccagttatttttttgacataactttatccatgtttcctgattatcttatgattcctctgtctgatatcattccacactatgtaaatcctagtttgtgcataagtgtgcatatccatgtgtttcactatgttcatttcattgtgcaatgtgtctctagcaagagtgtggattccgttctttttgatttctaccatttagataataattcatttttaaattttttattcctatctatgaatatatgtctatatgggccaatggaagccagaagagaatgccaggcccctgtagctggatttacagatagttgtatgcttgatgtgagtcctgggaatgaactcaggttctctgggagacaatcaaggacttctaacttctgagccatctccccaaacgtacctccttctcttggcataacatgaatgaatggctttaggagtttctgctgaatggaataataagatttgggctgacacagtgagagtctacttctaagaaatgggaaatccctaggctctgttgtcagtgaggcaagactctaagctatgcagagctaacctcatagaacaagccacttgcagtgatttcatggatgatactatgtgttaaaagtgtattttaaaagagtactaagcttagaaagatgtcacctttttcggtcatttcttctgtacagtatgatcccaggacttctgataatgttgctgtgttatttcttcagctctgaatagcaaaaggaataaggtgattgggtttttaaagctttcctgcagcatgtgagttagctataaaaagaaaaaggtgtaaactacttcaatatgatgctattacaaaatatagctattatttcaaatgcacaatggtgcctgtggtaatggctgagatggtaatttcaccctaaactgtagttttcaatggcttatttaacatgaactcccaatttacactgttgactgaaacttctcaagctatattttcatgccctggggaaatttcataaagagatgaaatagaaatctctttagctgtcttattcaagcatagcaaaatataatgttcccacaactattaaaattttggaatattttggtgacatgtacattattaaatgatttccaatgctttctctttcacataggcacattttcccagaaaggacagactgtgtaatttaacacactcttcaaacatttaaaatagttaaacataaagtcttaaatatttgaacatgcaaaatgtttttctttgattcagtaggattctatcagaccactttgtttggatgctattaaaagatgcctaattttacttttctaattgctgctctgtttccacatgcagacattagagttgataattatgccagtggccccttggacatactcatttgtgttctttctatttactcttgtcaccttcagcttttcattattcacttggattctgaaactgctgagggtctggttattgttgtttctgtttgcttcctggaattgttgttgtttttgagaatatcgtaaacctttctgctgtcctgcttgaatgctttcagtcaatgacacgggaagagggaatctcatttgagaaaatgcaactgtcagttgggcccatagacaagtctatgaggcattttcttaattaatgagagatgtgggtggtaccacccatgagcaggtggtcttataaaaaaacagctgagcaagtcatgaggaacaaagcagttagcagcattcttccatggtctttgcttcagttcctgtcccaggttccttccttcagttcctgttccaacttcccttcatggtgggttgtaagttgagagaatgactctttttgttcccacatagattttactcatagtgtttatcagagcaatagaaagcaaactagaaagaaagacttaaaattgatttctctctggatgaaagctgttttttgtcctttgtctacattaaatttagaattcctacatttggaagaacaattggttctcacttaattaatcatcctataggtgttcctaaatgactagaaagtggttgcatgtagctaagacagaaagaagtaaactgctacagggcacagatgtaggtgggaagaatttgttcttgtcctggatttagagcaaaaagggatttcaaagctatctctctcttatctccggtggttttgtaaaacttgcttttttgtttttgcatattttcaggtgtgagtgttgttcgtgaatgggtatatgtgaattggagcattgtgtgtgtgtgtgtgtgtgtgtgtgtgtgtgtgtgtgtgtgtgtgtgtgtgtacattaacttgtatatattgtatgtatgtgtatgtgtgtgtatacatgcatgtatgcttgtgcatagagaccaaagcttgacatcaggagtcatctttgatcattctttcatcttgttcatggaggcacaggcagtcaaatctgcctatactacctacacaggcttgaattataaaggggagtgtgtcacactcactgtatatgcatttttgtgaattcagggagtcttaactctggtcttcttgctggcacatcaagcactttaaccactgagccatctctccagccctccctcagttcttgagtagtgatatatgttcatagtatataattgacattttaatcactttgttgactttgattatggctggattttgtgtatgcatatgcatgaagcttgaaagatgatgtcagcttcaatatagaatgttttaaccatggagaaaaacatggtaaatacatgtacggacacatgcatacataaatagctactgcctcagttagccttaactgtctatttgtaaagccttgaatcaccagcagagtcagtcaaaagtgagtaactatcttgatcaggttgtcttgtgagcaagtttgtgaaggactgcagattatcttaattgcataaggaagatccactccactgtgtactgtttcatttcttaggcaggtggtcctgggctgcatataaagccttttgagcatgagccagtgggctagacagccagcagcatttctccactgtttctgcttgagttcctgctccaacttcccttagtgatccagtgtaacctggttgtgtaagccagataagctttttcttctcagaagttgcttttggtcaactgttttgtcacagaagcaggatgaaaccagagctagaaagaaaaggcctatattctaccgtataccatggtatgacagtcaggttacatgaaggggtttttgaaagtgtgcccctaagtgatgttattccatcaagatgagcctttttttaaaatttgtattaattcaaattaggaacaagcttgcttcacatgtcaatcccttctccnnnnnnnnnnnnnnnnnnnnnnnnnnnnnnnnnnnnnnnnnnnnnnnnnnnnnnnnnnnnnnnnnnnnnnnnnnnnnnnnnnnnnnnnnnnnnnnnnnnnnnnnnnnnnnnnnnnnnnnnnnnnnnnnnnnnnnnnnnnnnnnnnnnnnnnnnnnnnnnnnnnnnnnnnnnnnnnnnnnnnnnnnnnnnnnnnnnnnnnnnnnnnnnnnnnnnnnnnnnnnnnnnnnnnnnnnnnnnnnnnnnnnnnnnnnnnnnnnnnnnnnnnnnnnnnnnnnnnnnnnnnnnnnnnnnnnnnnnnnnnnnnnnnnnnnnnnnnnnnnnnnnnnnnnnnnnnnnnnnnnnnnnnnnnnnnnnnnnnnnnnnnnnnnnnnnnnnnnnnnnnnnnnnnnnnnnnnnnnnnnnnnnnnnnnnnnnnnnnnnnnnnnnnnnnnnnnnnnnnnnnnnnnnnnnnnnnnnnnnnnnnnnnnnnnnnnnnnnnnnnnnnnnnnnnnnnnnnnnnnnnnnnnnnnnnnnnnnnnnnnnnnnnnnnnnnnnnnnnnnnnnnnnnnnnnnnnnnnnnnnnnnnnnnnnnnnnnnnnnnnnnnnnnnnnnnnnnnnnnnnnnnnnnnnnnnnnnnnnnnnnnnnnnnnnnnnnnnnnnnnnnnnnnnnnnnnnnnnnnnnnnnnnnnnnnnnnnnnnnnnnnnnnnnnnnnnnnnnnnnnnnnnnnnnnnnnnnnnnnnnnnnnnnnnnnnnnnnnnnnnnnnnnnnnnnnnnnnnnnnnnnnnnnnnnnnnnnnnnnnnnnnnnnnnnnnnnnnnnnnnnnnnnnnnnnnnnnnnnnnnnnnnnnnnnnnnnnnnnnnnnnnnnnnnnnnnnnnnnnnnnnnnnnnnnnnnnnnnnnnnnnnnnnnnnnnnnnnnnnnnnnnnnnnnnnnnnnnnnnnnnnnnnnnnnnnnnnnnnnnnnnnnnnnnnnnnnnnnnnnnnnnnnnnnnnnnnnnnnnnnnnnnnnnnnnnnnnnnnnnnnnnnnnnnnnnnnnnnnnnnnnnnnnnnnnnnnnnnnnnnnnnnnnnnnnnnnnnnnnnnnnnnnnnnnnnnnnnnttattatttgaagatgaaagaacaggttaagactagaaaatttatgatagaaatacagaaatacatataaacttctcaaaacggaattgctgttcactatttctgtcatagtattctgtaacaggaaaatgaatctcacatttgtacattaatagcaagtcattttattactggctgttcatgtagaagtataatctgaatggctactatgtattgagtcatttccagaaaacacttattaactactcagttttacagaattaagcacattcatgaaaactattgagcgagagaatttaattttaaagcatgttttgtagtattttaatgaaccatacattattctgaaatactatagtctttcattccagtttgggaaatcatagagttttattccgcagtttgtttttagccaggctgacttttgaaatatggcaagatatttgaagttagtccattgggtcatttatttcaattacctgtggttttgtttgttttattttttattatttgtttgttttacttgttgttttactttttttctaatcagggtgtttttctagctctggctgtcttggaactcactcggtagacctagaactcctgtttaaaactgctgttagtgtttgtattttattacacttatattttacatgttacatttgtgtgcacgagtacatgtgtacatgtcagaggataacttgtaggagtctgttctttgcttctaccatgtggatgccaggattgaattcagggcatcacttgattctttttaggttgtgtatacttatgggcttttagtttcctcagccagttggttgatatgtcttccctttcttctgtgtaaggttttgtgtattggttgaaaatagactacaaatatctattcatttctgacttttgtctttttgtagccaattatgtatgagcacagtaaaatttcttgacaatagctgtgtgatattttgatatcagttgttgtaatgactccagttttcttttttttaatttgtatttaaattaaaaacaatcttatctttcataccaatcccagttccctctcccttccatcctcacatgcccccaccaactcctcccctccatccactccccagggagggtggggccttccatgggggatcatctaagtctgtcacatcatttggggcagagcctaggccctccccattgtatctaggcggagagagtatcactccattgggaatgagcactgtcttctttttaaaaatcaaagttatttggggagttgttttttttttctttccatatgaatttacagatttttaataaatgtctgtgaaaaataccattggtatttttattttgctttggatatatgtgatctttagtaatatgaatattttaaccatgctaattcttgcagtgcacaaacatgagctattttttcattgtgttttatcctctttagtttccctcagcattgttttattgcagtagctcaaaatcttataaagtaataagcaaattcagttaagtttcaacataaatatatagaacccagtgacatttttgtgaaccaatattgggattccaaaacagaacaaagtccattcaaaatagctaccatgctacaacactaacaaataaattcaaccacggaaatatgcccttaattcttctctttcacactcatttgtgtgagctggtgattttgtatattcagtatatctgagacccctttaatatgtctgccgaactggtaaagtcttttattttttatgcttcttatgagttcatgatggtagctatcatccttcccactttagactttggggcatccttactgacaggctttgaggctgatctggagatgaggaattatctgagtttgcttgtttttacactgtattcatttcttcttcaagtttgaaggataattattttgtaagttttgtgtgtgtgtgtgtgtgtgtgtgtgtgtgtgtgtgtgtgtgtgtgtatgtgtgtaactgtatttgtaaaagtgaatgtgagagtgggtacactcagaggccagaagagggtatcagacaccaggaatctagtgttacaggcagctgtgagctaactgatgggtactgggtccttctttaccactctagcccttgaaaggtaactttttaaatggtatgattgttactcaggaaaatgggaatcagtctacctcaagatccagcaattccactcttaggcatatacccaaaggatgcacattcatacaacaaagacatctgttcaactaagttcgtggcagcattatttataatagccagaacctggaagcaacctagatgcccctcaactgaagaatggatagagaaaatgtggtacatttacacaatggagtacaactcagcagataaaaaacaatgggatcttgaaattcgaaggtaagtggttggaactaaagaaactatcctgagtgaaataacccagacacagaaagaaaaagcatgatatgtactcacacataagtggatattagacatagagaaaaggataaccagcctacaatccacaccaccagagaagctagaaaacaaggaggaacctaagagagaccctttccctgagaaggggaaagggacaagatctcctgaggaaattaggagcatgggggagggggagggaggtaggagaaagaggaagaaagaaaggcagggtggaggagaacatgagggatctggaaggtcaagtttggaggaagaacagaggagagtaagaaaagagataacttaatacagggagccattaagggtttaaggagaaatcttgcagtagggaaatctccagggacccacaggatgaagtcaactaagaatctaagcagtagtggagaagctaccttaaatgcccgtcccctataatgagattgatgactaccttaaatgtcatcacagagccttcatctagtagctgatagaagcagaagcagagacccacagctaagcactgagccaaactcctggaatcgagttgtcaagagggaagagtgatgagcaaaggggtcaagacgatgctggggaaacccacagtatcagctgacctgagtaagtgggagctcagggaccccagtctgacagtttggaaaccattctaggatagaacttgggtcacttgggggtcctgggcagtctatggggcctctgggattggaaacagtatttatctctagtgcaggagagggcccaggttcttccccaaataatgtgacagactttgatgatccccgagggaggcctcatcctccctgaggagttgatgggggtaggacggggcgggggagatgttagtgggcatgggatgatgggagggagagggaactgggattagtacataaaataagattgtttcttatttaaataaaaatcattttaaaagtagtattttcatctttctcctgttttttttttttctgttgcattttgtatattttgtttttctttcttttttttcaataagatttcagctgaactctgctttcaagtctcaagtgacacatatttttcttgctgtttgtagaattctgttttagatctttgaaaattcaactagcatatgccttaaaggtattgtttgggtccttgcaatttctgggtctacaaacttgaatagttttcaatatttggaaacttttcagctgttaatcttttaaataatttttgggatgttcttccttctgttgcccgtctgaaattcccagtttcagatatttgcttacttaatgtcatgccacaattttactcaccttccacccctctttgtcttccccctctcctcttctctgtcctctcctttctaacttatttcaaaatagctgttttcattcttacacattctggtattgagggttcaaccatagtatttattttgttcactgatttccttagttggaggtttctgagactttaaggaaagtttctatgagccctatgagtcggttgcagacatggaattcagcacagtgcctctacatcttctgctgtgatgaatgttggaaacactgtgcatgttccattaacctgaacagcaggagtttgcagggggtctaccttaataagacagctttagcaacagttttaagcaacttgcacccagcagcagagccaaagcatattttaatttcttcagtctccaccgggatgggactgctctggttggctcagctggtttctcagctagtgtggcagcatgaatgaggtacctgttattttctgaattccttagttgggtgttgggtcactctgtggggtctgaacaagactgtgaggcacttctcaataccagagtgtgtgtgtgtgtggggggggctgggatatatcatttggctcaggcaacacacttatcagtagctgaaggctatgtggatgcctttgtaaggacttgtagattgacttgctctgagtggctgacccaccactttcctggtatatatacatgcacatatacaatataccccctccacacatgcagagatacaagtatctagctaaagactatgatttaagaaacttaaacatggtggattaactctgagttcctggatagtctttctgacctggaaaccagttctgactcttgtgttctgattgctagcacaattaggacatgaattttggtctggagatgcttcattttatgttttcatagtactttatcattcacatttcattttctactctcaaacttaatgctgtaaacagaatttctcatgttttatatcacattttaagaattgttatcaatagaatacaaagctgaaaagtcaaatacatggtggtgcagtatgctcctctgctcacacttcagagaggcaagaacttccctgttaaattcctgctgcacagtctgagattgtggtacattgtggtacagtgtgcaagtcagacagacgtcaagagatgcttgctgaaggggtcaagaccaggctggagaaacccacagaaacagctgacctgaacaagggggagctcatggacccccagactgatagctgggaagccagcttaggactgacccataccccctcaatgagaatgtcaatttacctctggtaatctatggggcctctggtagtggatcagtatttatccctagtacatgaatggactttgggagcccactaaacatagagggaaactctctcagcctagacatgcaggggagggcctatgtcctgctccaaatgatatgacagactttgaagatctcccatggaaggccttggaagcaaaaaggggatgggatagggggttggtgggggacaggagaggaggggaaggagagggaactggaattgacatgtaaaacaagcttgtttctaatttatatttttttaaaaagggaaaaaaaaacagatgcttgctggggcctgctgctggtcaagggctcattttattacacatgtattgtattaaaatgcagtagatgtgctctttcctgaggctatatagtaccagtgggtcagccctgaaaactatatacaggtaacactatatagactgaacaggctatatttttgtatttaggaatatgtttctatattcatttatgtatgtaacaataattaatgaacaaaaggccatgaatttgaaatagaacaaagaggggtgtatggaagggattggaagaagcaaaggaaagggggaatgaggtaattatattaaagtcaagaagaaaagaactaatttttaatgcagtaagtagcagacacagagtgaagtggattccttctttggtagagactgtgtataaatgcattctgtcatccagcctggtttcacagtcagcttcttatgtcttttatcccacacactccactggtagagcctgctaataaatgcttttttgccatcttggaaaagaacttttaaaataacaagaatcctgagaataaagaacacagttttgaacttattattattttgatgaagtaagaagcagggaaagaaaattctgaagaatgtaagcaaactggattatattgtaacatctacctttaaaaagatatggattctaacacctcagaacaagcaataagaaagaaatgacatcatgcttgggaaactcctgagttcgttgcatagtgagtgttgaacatattttgacactattctgaaaataaattgcacaggatttccaatataaacagagtaaaagtggactagggcaacatttcaccaaatatttgcagggttaatttctacattattgtcttctagtcactgtgggatgaaatttcatggatcatggaggccagtggattttattatccaagagaagagtgggggttggtaggcagacaagtgctggaaaaaaaaataagttcatggagaatggaagataaacacaatacagacaaattaatttacagctcataagagaaaattggatatatatatatatatatatatatatatatatataaatagctatgttctataacaaaataaaattcttgccaaaaatcaagttttacatgttggtagatatcaaggtcagtagtgttctttctatcccttgatggtgaacagacattttggcctctgcctgtagtctcaaaaggcacagccctttagcagctatccttaagggattccactatcttggtcccaagaacaggtatcgggaaatacatttctacaggaacaaaaacaaaccaaccaaccaaccaaacaacagaaaatatggcctgaattttagaagtcactaattagaggaagatttaagtttgctaatatcaccaaaagacttgatcacttaaactgctttcacagtgttttttactcatgttattgacccaaactggaatcagagatgactcttctgtctctaaaatgaccagactgggaatactttctgggttctgtgtgaaactttcacttgagacaaagcatacccacagcacatggcttcttcaagggctgactttggaataattcaagttacacagactaccatacttttaataatcttgtgcaggacagtagtcagatgtttaaaaatcccaactgagaatttttggtcatttgtttggggttatttatcttgcactagttagaatgaattcctattctatgatgtaaaataggggttgttgtcaattgggatatcaaaacagaggagtttctttacattttacttccagatgaagaaagacatgagtgattagctcagtattttcacagaagcaattgtagtaacaggtatataaacataattgggagtgactcaggctgaaagaaaactagagctctcaattttatgggttaaataattcatgtatcatattaaaaataaaaatcaacccagggcttgctctggtcaatcaagagaggacaaaatttgtatattattgcaaattaaaatgtttattctgttcagaaaagacataggtcaactctggctttgggagctatttagggattaggagctatgtcattgtcctctcgctagtaagaaagcattttggccaccaaatctgatgagctgatacccagacacacatgctaagaggaaagaaccaaccctaagttgtcctttatgctcctcaggaatgccacgggacttgtacatatgcagaaagacacacattagtaaatcagtattatttaaaaaatagagaaaaattgtgacattttctgatcactgaacatctgttatgtgtgtgtttattgtgtgtgttattgtgtgttttagagtgataagtatatcttcttttaaccaaaatactgttacattatataaagcaacatgcttccaatccatggtgcagagtgcattttgtttaacttcaaagaatgaatttgctgttgtttgcaggaagatggatgcagtagagataatcgtattaagtgaattaagacagtttgagaaagccaaagaaagatgaggcacattctctctcatttctgaatcttacattttatatagatacagaaaaccatttgtacatctttaatatgaaagtagaaacaaatattttctaggagaacaaaacagagaaaataaagggaaaactgaaaaggcaagaaaagaggatttatgggggtgaatatattcaaaatgcatagtaccactacattaacatgtccttacaaaacccagtactgtatactgtgaaagtaaaccaattaaaatattatttcaaaatattaaattaaacagtccaaactcagggaaggcaggaaatggacggctctcttgttcagcatgcagtcaatattcagtagaaattttcagaatgaatgattgttcctgattttactttgacatatatagaacataatgtcttttttattatcaaaatttaacttctatcccagtcgttgttctttgggggaaaagaaatatattacaactcaattctacttttcccttctaatgcactggagtaatgtccacattctcaggagtttatatatcaacaaacattggatgtattttcctggcttcaaagtgattttcatgtagaggcttcccaggcttcactggcctggaatgtcccagctgcaagcattgcaagtggattgctgctgagtgacctctttagttttcttttcactgtcagcatcccaggaccattgaagctcattcttcttcttaaagtcttagaaatgaaagagaagatattttaaataaatagttaaacataggtctaaatagaaaatttattaaagagattctgtaactgtgaagaatcctccgaaaacaagaatgaaatacagaaggcagctgcagtttcagtctctgtgggcatctgcggtgggtagatttgggtcgacactagaggcagcaggggcttggagaaggattggctatcactcactctagctctcacatcttacccttgtccagcatgctctggttttctgggtccaattaagagcagctgatatatgggctggagagatgactcagaggttaagagtagtgcctgctcttccagaggtcctgagttcaattcccagcaaccacatggctgttcacaatcatctataatgagatctggtgccctcttctggcctgcagggatgcatgctttccggacactgtatacatcataaataaatcttaaaaagaaaaaaaaaaaagagcagcagatatgagatctaggtttcagtaagccagggtgatatgggtggtataagtatccatagcctgtaaagtatcaccacccaggtaattagctctgagagtgattgctgcaaactagactcttcccctgtcagtgaataattcactaagaatccagctcaggcatcaccaagtggacagtataaatggacatagcagacagtatgagaggtgacccccaattttaagtttgagtacataatcaagactatgaagaaagtgagcactaaggtaaaattaatccacacacaagcacatatttgtattttaaatatgggcaaagatggagagatagatcaatgggcaagtgagctttctgtgatactgcaagcacaagcgtctgaattctagtctccagccccacactgtaaccacagtgaaattgggaccagagatgggaatcactgcagctttttaacctccagtctggtgccaggttcagtgagagactctgcctcaaggggaaaaggtggagacagagcaggtcaccctgtgtccacaggcctctacagtaatgcatggaccttcacatactccattcacactgacagatggatagacagacagcagacagacagacagacagacaccacacacacacacacacacacacacacacacacacacacacacacacacgaggacttcactaattagccctgtgatctttaagaagatctctcatgacttttgtatccttctgtagaaagcatcacgtatgtggcattgtcctaacacatctgatgaatcttcaagcttagagaaggcggggcattacaaataagcctgtctcaccttccacctcggagaagctctctttccacatactaacaatatctaattaaccactgtaacaagctgtcattaaggggtaagtggagtaaatggaagagataatactaaaattaatttttaaaagaaataatcctagtgtgttggacaagaaactcagaagtcattaaaaacatgggagtgataattaaccactaagtgctcgagacaatgagacatctatgctccaaaaagacatccacatgtgcagcgactcactgaggagcagatgaatgcaaaggtaaaattaaaaacataaaagtaaataaataaagcaaccccaaatgaccatatggcttattaatgtgctcgatgcacctcttcctactgtagtgataatggtgctggatttggggatctgggaataaaattctctttataaagccaactataaatgttagcatttgaatctaaaatgatcttaaaaaatcatgtgaaaccatgtctccatcccccatgttgcagtttgcagaggtggggctttgtggtggtgatatgataaaggcttcaaacttttgattggtttaatctctctacggacttatagtttgatagggatggtattccttatgcaaggggatctctctgcacttcctggaatattctatgtcaccacaggcctacaaacaatgaagtcaactgaccttggactgaagcttctgcatcagagagcagaaaaacaaccctgtccttatttcagtttacttctctaggtcttttgtcacagaagtggagaacaaacaaacagaaatagagctttgtctccagaaaccattgcactgtgcagtaactgcatgcaaagcaacagctcttggttggctggattcccacttattaagcatccatttatcacactctagtgtagacaccctcagtcgccttgctgtttccccttacagcccaaatgataggatgtatccctgttctcccagagccctcaccttccctatttctgcttcctgcaggctatggattcatctttgagggaggcactgaattctctgagagttgcttgcttgagtctttcaagacacaagtgtgaccaccttcttcctggcttagtgttgtctgagctaccccaggaaacacaatttctctagggtctttgggttttcttgaaaatatccactggtctctcttcacaatctttgaaaggtcttgtgcaacgagaactgatagctcttgtactctttagactgtgaagcacaccccacagtgttttctgctttatttctactgttgagattttgttctgttttgtcctcttcttttgttcagttttatttatagagagaatgagaggtagagatagggattcatagtatcctataacttacgtggcttactttgcagataattaaggaatggcaatgcagacatataaactaaataatttgggaaatgatgttttgaattataaaacattgttttttgcctttggagtatctgtcgtaatttactttgagcactgtgtttccctggtgtcttaaaatatagtataacctcttttaaaagattggttttacacctagaaaataatgaattggaagaatataacaaaagtgtttgttttcggatgagcacacagtctctaggccatagctggcgaagagaggatgctggtgttgtatgttaatgaaacccccaactgatgtgtcagctgaccttcatccctaatgtttagggtccttcacctctttataatgtccccaagagctttccttccttccaccagtgtcagtgagtcatgatccctgctctagggccttcctctgcctcagtatgcagctgtcacccctttactcagttctaatgtctgtggtcgctgagctatcttcgttggcagttttatttctgctgctggtagcaaatagtgcctaaacttcagagtggatacatgctggctctcccaaaatttaaactcctcccatgtccccaaaactctccatctaaatcaatgtataattgtccagccagtttgttcagttgtatgaaagaaccagcagtaggcaggaagggagagagcatgctgagtcctcattctgggaaagatccatcagatgaccatataacagctgtccgtctcttctcccagccaggattcatctcataaaacatcttcagaccttccatccctggtgtcacatccaagttaattctggaaattggggtgatttctacactaactgctaaaacttggaagtttctccaccatctcaggaccctgcaatattttacaaccaatttggggatggcaataaccagtaagaacagaagagaacatgatgttaaaatgcagttgtcctttggaaactttggttttgctcttcgttgtagagagaccatttattaacatttggcaggcacttttagtgtggaagtttcctggttttgttgttggattaaactagccagcacaagagggaaacagaaaatctcagggatttagagatttatctctcttaggatggctcttcttcatgaatatttataatttagatcctctaaattcctttacactgaagaggctggcttttctggtgatatttttagtttgaggccaatcaacatagtcagttgctggtgtgggtgttcctgctccaccattggcctccaatgaagagatggggcagtcctctcgatggtacatttctagcacattttggctcccacatggaaaagagattacagaaggaaggaaaatcactagggctcatgaggtagctcaatagttaacagcatggactgattttgcagaggaccagtgtttgttttctggcacatatgtcagatagtttcctgattagtgtttttattgttgtgatgaaacactatgaccaaaagcaactgagggaagaaagggtttattttgtgtgtgcttccatggcactggtattcatctaaggaagttagtttaggaacctggaagcaaaaattgttgcagaagccatgaagaagtgcttactagcttgctcctcatggctttcccagcctgccttcttatagaacccaggttcatcatcccagggtggcaacagccacaatggcctgggccctcccttgtcattcactataggcttacctacatcctggatcctatggaggtgcatagttctccaatgtggctccctcttttcacataactaacttgtgtcaagctgacataaaagctagccagtacagttcccaaatacctgtaactccagctatatagaatctcacatacttctgaactcctcagacacctgaagtcacattaattagcacatacccacaaagacaataatattcatgttatacatatatgtgtgtgtgtgtgtgtgtgtgtgtgtgtgtgtgacttaaaatttgcacccacatacacacacagacagacaaagacatagcatgtataaataaagtgaatacaattccttgaatgtattgtcattttattgggattcttacctttttagaaatgggcctttctctccacacccttgtgagtctgaaggagtaggaagaacattgggcatttctgaggccacagagaaggagccatctaacatgccttactgcctcagaagagttccagggaagttgataaaaggacattgctggggacaagctctcctgagtaaattgggagcatggggagagggtggagggaggtaaaaagagaggagaggagaaggggagtggggaacatgagagatcaggaaggtcaagttgggggaagaacacagaggagagcaagaaaagagatatcttgatacagggagtcattatgggcttaatgagaaacccagcactagggaaattcccaggaatccacatggatgaccccaactaagaatctaaacaatattgaagaggccagattaaataatcttcccttattgatgactaccttaaatgccatcctagagccttcatccagtagctgaaggaagcagaagcagagattcacagctaaacactgagctgaactcctgcgatccagttgtagagaaggaggagtgatgagcaaaggggccacgaccatgctgaggaaacccacagaaacagctgacctgagcaagtgggagctcaaggactccagactgacagctggggaaccagcataggacaaaaacagccccccctgaacgtgggtgacagttgggggcttgggaagtctatggggcctctgtcaggggaactagtatctatccctagtgcacaaatgggctttgagtgtccattggagggatactctctcagcctagatacatggggagggcctaggtcctgccccaagtgatgtgacagaccttaatgatcccctaagggaggcctcaccctccctgaggagtggatagtggtgggagcagggaagggaagaagggaggcagagggaactgggattggtatgtaaaataagatttttttaatttaaataacaaaaaagacattgctgaaagtttcccctacaaatgtttttgaaatgtggagacactcttttcttcctcttcctcctcttcctcttccttccccacctagtatatattagttacttttatgattgttattgcaaaactccctggcaggagcaacttaagaaagggagactctcttttggttcaccccttgaaagattcagtctgtcgtaataaggaaggcatggggacaacagcatgagctttcattcacaatggaaaagcagatggctttcttttgatgcagcgtgggatctacatctgtggagtggtgctacccacagccagagtgagcctttccaccttaactgaaatcccctcactgacaaaccctgaggtttgacttgaagttgattctccatcctgtcaagctgacagcattagcctacctacccaggatcaccatgatactctgaaatgagataaactggtatgtaatcagggtttgcaaatgtggtgcactcaattcccttctgaatagctggcctagggcatgtctgagacctcaggttctggaagaacacaacagaagcctggggaattaaattgttctttaaaacaaggtttacttccccagcatctttcacctcaaatactttttattatttttttagagattattgtttgctctctctaagattcaaagtatagtccttgagggcatgccattctgagaacttccaagctttgacgttgctgttgccttccttccttttattagtgggaatgctggatctcatcagcagagcaattgtatacactgttttgggcatgatagggatatatgccttttctgagctctgatttctgtgtcttttccaggaccctgatggcacccacagtgctgacaccttgggttttgtaaaagtcaaatgagataaacacaaagaacaaggtctttaaatgaatgtctatgaataatctgaattcattattcgcaaaacaaagagcttcacacacaaaattctttgcctcaaggctggcaggatggctcagccacggaaggtgctgtaacaaagcctgatgacctgcatttaatctctgggagaaaactgactcccactgattgtcctctgacccccatatttgcatctctactaactaaataaatgtaaaaattctttgcctcaaacttttatttcttgtgaaagcctccccagatgtaattgttattcttttgctagaaatttgagagatggacatggaccatagagagaacattaaccagtttattataggcagaagagcaagagggggctgtagggggcagtaagccacgcctgttagaggctggctacaggtgtgcctgaccaggcctgtcaaggtgtggtcaaggtgaagtcaggatgatgtggcatgggctcttaaggggcctcagagggtatgtaagccccttctcctctccttctccctggcctcgctgctaggctgcccctggcacgctctggcttgcttttggctggtatttatcagaataaaggtatcttgaacctacaagctctcccatgaggggggagagagagaannnnnnnnnnnnnnnnnnnnnnnnnnnnnnnnnnnnnnnnnnnnnnnnnnnnnnnnnncgaccaccagagagagagagaggataataatgctggggggttaaaagggggagctcatgcatgcagccccgtaatgagtgatgtatccatgaaatgaccacacagcacagtgccctttaagctgcctaggtcctgcctgaacctttcagtaatcaaactgtaatctttgttttctcactgaacttgttattatatattatggagtgtatgcaaataagcagacttactatgtgcaggtaacctgtcatgcagaatggaaaaaaatgaatttcttcagaggataagaaaatggatactctgtggaatctcattgtaccataggataattgtttatttagacagttgtatcatatatctgtatgaagctgacctgttctagtggcctattctggggtttcatttgctaataatgcaaataaaaaggcaatcaccattatgccctaaaagactaagttgaagtgaaggagagtgtttgtttaaggggtgaattttgctcaattcttatctacttgctgtttgtcttatgaaataagtttttgttttttaatgataatcttttcaggctgaatatttatagctaagactttgtatggaaactctgaacctaaatttgtttgtatcttgttacattctttggcaagactgaagacataaagcctgagcaaaagacagtaagactttatcatttcaaaactgcccacaaacctcataacataaataaaacatataaaaatgttccaagtatctggatttacaaatgagtcacaaagtacaagggagaaaaatccctgtatagatagattcatatgcaaatcctcctcataccattctattagaaatgcattgaatgatttttacaattgattacaaaccctttgcttctgggtttgggtttttctttgatataagaaagaacagataggaaaatgtattttgtgagttttgatttctgatttgcatctttgtaaattctcctcactgcttctggatgtttctaagcctgaaggaaaaatatgcctgtgtttgacagaaaaaaaaaaaaagtcttttcagcaaacatgaaagtattatattacttgttttaactctcacatacttgttagaagatattatggaaatcatcttgaagagcataaagagcgtgcattgatgtgtaaacatcacactgaagtctctgaaagttggtgacatttgaaatgaccttgtaggctatttgctagttagagattgtgttgttatttcactacattttggtagacaattcagccttgaaatccaataccctttatgcagttcgaccctaaagcacatgtcttatccatctagggaacagccccatcatcccactctaggtactttgctcctggtggtctcttggtccacatggagaaactataattccaagggatttatttatcttcttagatccttgttaaaatagtatggaatattgttgtttttcattatagtgttatgacttcaatctgtagaaattgtagctacacattttgccctgcctcgctttctgcacagcaattagtctttgagatacaacatacgataatttgagggtgtagtataacttaaaagtacatgatactatccacttttacttagaagtggttgtttgtattaagtatagctattccccagagatccttcggcaactggtatatgagcagttttcttcctaaggcgtacaaaagaaaaaaaatcactagtacatattagctacaaaatacttgatcccaaattgctaaatgtctctatttcccagagaccccccttttgccatctcagtttccctcttgtcaatttccatctaatggctaacattacacacaggctacagaggggttgaattacatatagctttcagagattctcactagatctagtgtttagaaaatcaagatgactaaacagacccctgcaaaggaagaaagccacttagatggagttgggggtgaaagaagcaggcttggtaattagaaagcactttgatgtttttcagctgtcactcaatggcccatttccacttggtagaaaacagaaagtggccataagaataaaacctgctgcccctgtgggagtgttacctctcaaagcctcatggcccaggctaatctttcctccataccactcaaggagcaggaagaatctgaaagccttggtcagcaatccagacaggattgaaaactgagcaggatggagtggggacttggagtcaggttgaagagaggattagtgtactgactgaatctggaactgagcacttcaagttaggactactttgaaatagtgaagtaacaatattttcttccttccttccttccttccttccttccttccttccttccttccttccttccttccttccttccttcctttctttttgagacaggctttctctgtgttgacaaccgggtgtcccgggaatcactctgtaaaccaagctggcttcaaactcacagaaatccgcctgcctctgcctccccagtgctgggattgaaggagtgtgccaccaatgcccggctgtaacaacatcttgatggaccatccttggttgtatgtaaacaagataaaagctcatgaaccattagttatgtgtatttcatgcagtatcagttcccttgctttcttctctccccctctggttctctggttttctttcttctctccccctctggttctctggttttctttcttctctccccctctggttccttctgccctccattctttgtttcttttctcccctattcttgccacccctctgtcttgtttgtttgtttgtacaggacaaggtatcatctccatgtaactcaaactagccttggactggatatatactctagaatatcctagtactaactacataaaccccaagactggctttgtgtatgatgaatcagaggcaggcatcaccatgtccagcttctatgccatctttataatatttttcccttctgccatattcttttcttgaataaattatatgatataatgttcaaaataatgtctcatttcaattcattacatgtatagtgcatcctgctaacagttcaggacttgtaacttgaaagaaaaatgagtttattttcattatgattatatatagtcatgaatgataataatgcatgcctaccctgacagtagtgatctagtatattgctttcatacagatttgaggagattgtgaatggtattttgttttcctagtttccttcctccctccctcacttcctccctctttcctttcctccttattccttctttccttcctcctcccctccctcccttccccctccttctttccttcctttctttttgtatacaggaatgctactgattttttttatgtattaactttctatacttctgctttcctgaagatgtttatcagatgtgggagttttctcatggactcttagagtcctttatgtattaaatcgtttcatcttcacatgaagatacttggattcagtcttttcctgtttgtatcctctttatctccttcacttgtctattgctttagctaagacattaaggactctattgaacagagtagggagtgtggacatcattgttttcttcctgattttattgaagatattttgaacaataatacagctgaggactaatggaagttgtgacatgacatgaaatcttttatttgagtctctcatgtttatttatgaagcaaaagttgttagtctgtttactatactatattggattatttgagaagcaaagtgaaaaaataatattgatgatgactctggcagataaaataacttttagataaacttcatgagggaatattaccaacattttattggtccattcttctctttctttatgttattagaaaaacagcgtttgttgcagatagctctaaattctttgcttctctctcccctctgagatgaccttttactttaccatttgagcacagtttcccctgagcaaggggggatgaattcagtgatgactgaaggagaatgagcatgatttccctaaagcacatcactttcctctgtttcctacatattttcagcctgagagtgatatgtttcccaggctgtggccaatgggatgcttaactccctaacttatatatcaacttatatgccattaaaataagaataatctgtctgaccttatgatataagagccaaatgaaagttataaacacaatattcttgaagactggcatctcagtttggctggagtgctttcacatcgagatctgtttatgcggactgactcacatgagatatggtcatttgcttctccttgatgttcctagacctgcggctctcaaccttcctaattctgcagtcctttaatacaattcctcatgttgtggtgacccacaaacataaaattcttgcactgctatttcataactgattttgcagctgttatgaatcattagtaaatatctggaaagtgcagagtactgaacccagcagggagagagcagaatgctgagcacactgggaatgctctgaataccgatcactgcacaaaccccacaggtaagtcaccaaaagtaaaagttgttgtcaagcatatatcaagccgcatgaaattggaagtggctcatgctgatggttaagacttaaagacagagagatgcctggtgttttctttaagtgtttgttatattcctatactttatagcatgttgtccttaacttgaatcatattcctgtgtattttcttaatttcacagctccacaaaagaacaaatactgatatgattaacatctagataagacacgtctaatagacgcttaaaatgacataggaacataccatgagtagcattacactaataaatgggaagaatgaaatggttatacccaatagatatgtccctgttgtcttgagcagcttgtgttgttccttagtcaagcaatataaaaccaaatcatagtgaaacatgccttcaatgagagaaatcaatgtaacccaccctaaggacagcatgtcagtatgatccttgtcttttctgttcacaggcagacttatgttggaataaggaagttcctttgtgaacctgcaattaagagtgttaagtgaataatgctcctggctcacttaggctatcagtggtagtttgctctactaaagttgagattttcaaaatcaaactcgcaaaagtattgttcatgtctcatttcttcatggggcattaggctctaaagcttataagtatgcaaaacagagtttgggttacaatgaacatacaactacagtattgaacagaatcaagaaactagaaaatgtaagttgatgctactgtatttgcatcctgagataacttgtcttcctagaatttagttttatatgcactgctcaaagggcatagactgacattcctgggagctaagtcttcttttttctattttccttgcaacccttttattgttcactgcttcttatgaacaacatgtaaatctaggctggtcttgcagtgtctgtggctaagcagaagagccctgggtagatggaatagctcttactgaaaataattggaatagattatgggatgtggaaacactctaggagtgtattgtgatctagaaaataaaaaaaaaaaatcctcaaatgctaaattgaagggaaacagtcagcctctgtttagatgccacaacctgtctcttcctttagggttcatggcaaacactagtgtatcgtttattgaagaatgtagaacccatactggaactgacttaaaatctaggctatgctttcaaagaagaagtaaatagaaaactactgtaagagtgaattagtcactaagagcaaataaaaatgtctatcatcaggaagtgagaacatcttaactttgacagttttaaagcaaatggagaaaataaagcaaaataaaacaaaatagagggtttccatacaatttttgagttagtactgcatagcctgacaggtaaagtccatgctagctctatgaaccaattccaaatggaaaacatatatatatatattcgagacaggatttctcggtatggctttggagcctctcctggcactcccttgtagagcaggctggcctcaaagtcacagagacccacctgcctttgcctcctgagtgctggtattaaaggcttggccaccacctggcagaaaacataatttttatcaacccaggttgatactgaagtactcattagtagaaaagaattttgtggcagtacgaagcttcatataaggtcttaaataatttctacaggcatatttaagacatgcatgcataaggcaaaaagaatcaataactaccacaagtgtgcactgtaaaagagacaaacacatgggagaatcacaccaatgaaaactgcagatattggtgttatcagacataaaaataaaataataattctggtgctatgttttagaattatgagaagccataaaatgttagcaataaaaagatattaaaaacaaaacataagtaaaattaaaccaaataaatcttagaaattaagtacatatattatgtgcatatataaatcactacatatctacagtgaattaaattaaaaatttaaacaggatgaggtaaatctgcttccaaatgggagaaataaattgtgtcggatgaattttctcaatcaagagtaactaaaatattaatgaaaaagccttagaatatcctcccccaagaaaacattggaagtgcacaaaatctttaaagtactggattcagaaaaatgcaacaatccgagttagacatttccaaattagagcgatcaacttggcaatgtgaaactgaaaagagtcttgggcagcttccttgatctaggagaataaactgaagttcttgagcaaactgcctagtaaacacaagttaaccacagaaacatagaaaaactccaaacgccatgttgtggaataactgagtttgtaacagattctgagatctgtggattcagtgaggttacagcacactttgcttttacagcacacacgtgagctttgaggtctctgctagaagaattcccctaagcctgatgatctgataaaggactcctcacattattctctggcttttatatgcatgtggctaaatgttcacacagacgcatgcacatacacacactttaaataaaatgtttataaaataaagaaatttatggtgttttagtttgtttgtttgtttgttttggtctattttcagaaatctcatgtttggatttatataaccaccaggaggcatgggcagaattacaaaaaaaaatggacataggttgttaaagtcatgtttggattctggaatggctaaaacgtagggccagactccacagaaactgaaatcccaaatcatacttcccagccttttaatataattgatgaagatagtatatccatactatgttattctgtttataaaacacacatttccttgaagaaaatcttatgtgtactatgtactcagaagtcaatatattgtatatgatacagaatcaaatctaataaacattgcaaaaacattggcttaagtaaatataacaacaacaaaacataatccttcaaaggtataaacattgaaattgtcagataggaccagcaagaaactataaattaacacaataatgccttggtatatttatatatgccacagaaatcaaataacaagatggtaaatttaaaaaaaatgaaatttcatatatgagtactgaatttataacaagtcatatgtcttctacactcaaattattgcctcatattctgtaattattactattatttattaagacaatctgttgaatcaatttcatgctggtcttatgtatgtttttaggactgacctcgttatatattataacctgttgcaggtcttgtacctagagaagactgattctccctctcttggtattcagttgatctccatctgacttagctaatcgtatctcaggtcaggctttgatatttcccccaatgaagtgtgcatgtaaacctgtgtgattattattcaggttttgtttagatgactattttttgagatttcataggagcacctttttagttttatgtaaaagacactatctcaccacagacatcctgtggattttacagtttttctacccctcttccaagatgttttctgagccttaattttagccaaaggcaggaaaatgtaataaaaatgttcaggaggactgaaggtggagatccatgatagagtatatggtttcttgcactttaaccccagtgtggaaaaagaacaataacaataaattaaaaaatacatattttagaattgaacattataaaataattcatatgaattgtttggacagcagatcagtgtggtaatatattatttatgatttattaaagcatacatgaatattgagaaagcaaagccagcctcaggctcatagagatcaggcagtggtgatacatacctttaattccaggactcaggagaaaggcagatggatatctgagtccaagaccaacctgggatactggagagtgaactcacacctttaatcccaggatttgagaggtataaaatgtagagccatttggtctgagagttagtttctagccacattgaggagagcatagcagtgtgagtgaatctgaggagcagtgaagttgggagcagtttcaggattgcccccttggtccaggctgaggtaaagataagagctagtggctggctgctttgcttttctgatcttcagcctgaagctttaaacccaatatcagtctttgggtcttttatatattgtgctgtatatcataccaatctagataaagggaagctaattctgcatcaatatagagagaaaaacacagacaaaaatctgaaactatggtaaaagtatcgacatgggccatcacttataacatttagcatatttattcttagagttcctgaaaatgaaaagagaaatatattaggatagtcaatacttaaattgcttaaatctgcaaaatttgaggaatgatactaagtacaaattcaagagtgctggaccctacaaaatagttgcacataggtatttcaaaataaaacatagaagatcacaggtttaaaaaagcacaaagcttgagatcacaatccaatatctaaagatgtttatttattgacttacataatacgttctccaatagtcaaggctggctttgaattaactgtgttgccaaggataacattagatttctgattctgcatcttaggatgacactgaataatctctgctccttcatcttagggtaacattgaaattctgctccttcattctgtggtagcaatgaacttctggtcctcatgccttcatatctggagtactaggatcactggtgggcaacactgtatccatattttaccatactaaatatggaaccaagtaatatcttgcatgctacaccaattcttcaacaattatgtgaaagtccaaacccaaagcattatgtagttgttgatgttttcctttttattactgggcataaaacctggaatctcttgcatacaagggatatgcactctaacaactaaactcttggtgtgtgtgtgtgtgtgtgtgtgtgtgtgtgtgtgtgtgtgtgtgtgtgtgtgtgtgatttttttagagagaaagaaaaaaacatgaagttatgtgtgtagagtggtggtaggatttgggaaagagaaagaatacatatattttattcttnnnnnnnnnnnnnnnnnnnnnnnnnnnnnnnnnnnnnnnnnnnnnnnnnnnnnnnnnnnnnnnnnnnnnnnnnnnnnnnnnnnnnnnnnnnnnnnnnnnnnnnnnnnnnnnnnnnnnnnnnnnnnnnnnnnnnnnnnnnnnnnnnnnnnnnnnnnnnnnnnnnnnnnnnnnnnnnnnnnnnnnnnnnnnnnnnnnnnnnnnnnnnnnnnnnnnnnnnnnnnnnnnnnnnnnnnnnnnnnnnnnnnnnnnnnnnnnnnnnnnnnnnnnnnnnnnnnnnnnnnnnnnnnnnnnnnnnnnnnnnnnnnnnnnnnnnnnnnnnnnnnnnnnnnnnnnnnnnnnnnnnnnnnnnnnnnnnnnnnnnnnnnnnnnnnnnnnnnnnnnnnnnnnnnnnnnnnnnnnnnnnnnnnnnnnnnnnnnnnnnnnnnnnnnnnnnnnnnnnnnnnnnnnnnnnnnnnnnnnnnnnnnnnnnnnnnnnnnnnnnnnnnnnnnnnnnnnnnnnnnnnnnnnnnnnnnnnnnnnnnnnnnnnnnnnnnnnnnnnnnnnnnnnnnnnnnnnnnnnnnnnnnnnnnnnnnnnnnnnnnnnnnnnnnnnnnnnnnnnnnnnnnnnnnnnnnnnnnnnnnnnnnnnnnnnnnnnnnnnnnnnnnnnnnnnnnnnnnnnnnnnnnnnnnnnnnnnnnnnnnnnnnnnnnnnnnnnnnnnnnnnnnnnnnnnnnnnnnnnnnnnnnnnnnnnnnnnnnnnnnnnnnnnnnnnnnnnnnnnnnnnnnnnnnnnnnnnnnnnnnnnnnnnnnnnnnnnnnnnnnnnnnnnnnnnnnnnnnnnnnnnnnnnnnnnnnnnnnnnnnnnnnnnnnnnnnnnnnnnnnnnnnnnnnnnnnnnnnnnnnnnnnnnnnnnnnnnnnnnnnnnnnnnnnnnnnnnnnnnnnnnnnnnnnnnnnnnnnnnnnnnnnnnnnnnnnnnnnnnnnnnnnnnnnnnnnnnnnnnnnnnnnnnnnnnnnnnnnnnnnnnnnnnnnnnnnnnnnnnnnnnnnnnnnnnnnnnnnnnnnnnnnnnnnnnnnnnnnnnnnnnnnnnnnnnnnnnnnnnnnnnnnnnnnnnnnnnnnnnnnnnnnnnnnnnnnnnnnnnnnnnnnnnnnnnnnnnnnnnnnnnnnnnnnnnnnnnnnnnnnnnnnnnnnnnnnnnnnnnnnnnnnnnnnnnnnnnnnnnnnnnnnnnnnnnnnnnnnnnnnnnnnnnnnnnnnnnnnnnnnnnnnnnnnnnnnnnnnnnnnnnnnnnnnnnnnnnnnnnnnnnnnnnnnnnnnnnnnnnnnnnnnnnnnnnnnnnnnnnnnnnnnnnnnnnnnnnnnnnnnnnnnnnnnnnnnnnnnnnnnnnnnnnnnnnnnnnnnnnnnnnnnnnnnnnnnnnnnnnnnnnnnnnnnnnnnnnnnnnnnnnnnnnnnnnnnnnnnnnnnnnnnnnnnnnnnnnnnnnnnnnnnnnnnnnnnnnnnnnnnnnnnnnnnnnnnnnnnnnnnnnnnnnnnnttttccccgagacagggtttctctgtgtagctttggagcctctcctggcacttgctctggagaccaggctggcctggaactcacagagatccgcctacctctgcctctcaagtgctgggattaaaggcatgtgccaccaatgcccggtgcaatccagttttaatatgaaattttcataatgaaaaagtgaaattcaaaatgtgaagatagtgctttctgtacataatggggaattatgaaatgagagaagctagaacaatgcattaattatttttgtagttgttgggagaaattatattgtgatcttttataacattttataagtcttcaacattatataagaacttgacagtagatgttcatgtttctacctgtaaatttccacagcttttgctgtcttggtgttatcattgatcaattggtgtttttgttacctacctaatgatttttcatattatattgcaaagttgttaaattcatagttttgtactcataagaatgattcagaagagaaaaaaaaaactatttcatgattctgagtttgagcagtaagtgaaactaagtctttggatgaccaagattgaatggaatcatgagagaaagcaaagttgtctcccagctgtatgtaggaacttggattgtctcccaggaaagcagttatgcaggggacagtaaaatgttaggctgatgcacaagaataggcagtagtgacctgggattcgtaagagttttcatcacttctattttctccagaaattaaacaaactctaaagagatagccagtaaaaagtgaatttggcaatactagaatcggtttgaagattgacgaagatatgggatactgagaataggataataatttatatttaaagacttcctgatgtttgcagttatgaatgttttcagacagtctgggaagtttgggagaaaaagaatgatatcataacttcagacactgcaactcagagtttgtgcacacacatataaatggattaataataatcaatttgggggaattttgcttaaagacataggtaagcacttctgccaacctagacaacctcacagccataaactcactttcttgcattgctgtctgattgtctcatctaagttaggaatattaaatgaaaatgatatcaatttttagaaagacacgaaatgcccatcatctaggaaatcccatttatagtatttatttaagctaaataaagttcaaaaactcaaaaaaaaatcatttgtaatgtccaacaaagaaaacacagagtgggaaagggaacattcatccatgtggttctctgaccttgcttgtctgggaggcattttgattatcatcatgttacctccattggtcttcagaaatgttaaacgaaacactgttttagaagaaattggttttatctgaggcagaataaggaatattaggctctcttcttgaacagctatttgaaattcatggaatagcccacaaaaccttttatttatgtctcagtttttttcactttcattggaaaaagatttcatatgtgaacagggaatgtcgggaagtatgagctactcagccatcgtgtgtgtgtgtgtgtgtgtgtgtgtgtgtgtgtgtgtgtgtgtgtgtgtgtgtgttgtgtgtgtgtgtgtgtgtatcattctgtgtgtgtgctcatgagtatgcgcatgtatgtgactatgtgtgtgtatgagtatggtgtgtgtgtgtgtgtatctttgtatatagaaacaccgatgttgatgattctgcaatgttatattggctgataaaatcttcattattagtatatttggaatgttgcttaaattatgctgagtctaaattatctttacctagttttaatattgagtcattcattgtcagtttctgtatcatatctaactttgtgtttaccatcagagaagacctttgtaaattatccatagaccacacctgaggcaaatatttctcatttaccagatatagccttatattgctttggaaaatgtctcaatttgtagttgtttttggttctgtgactgtagaatattcctagagccactctccatttggaatataccattgtgggcaaattagacacatgttcctaggcatagctcctgtacttgaatcaatgttagttgtctcttagtctctttgaggtacagtgtatgttttgcatgcccaaattaacaaatcatcaggctgaaaacttattttgtactcttttgtcagggtgatgaactacttgagtggtatatgctaatgacgacttttcaggaagattctctgtttctcttctgtatagatttagatgttattgttccaaattctatcatgtgcccacgggggggggggaagtaatagaaagcagagaccaaatgattttcactgcagtttcttctagctataagaactgagttaacaatagaaagtgcttgtttgaatcctgtagttgttcacaacaaactcaaggaagaaaaacccaagtcacctgttgttagaggaacacaaccgactttacagacatatatgaagcagcatcatttagcagaatctctagggccttatttagctcagtcttacttattttagtaatcttggcaaagaaaagttggtctttttacattgtttttttaaaatcacaactgaaatagtgtcaagcacactttgaattttaacaaattctatattctattatattttgaaggtcatggattcatttgcattcatagacaagtacttcagcttaggacagagttttttatcttgaatatactttatgtattcagcaccccactgtgccatttaaaataatcctagaatcaaatgtgaatcattgccatgttctgtcaaaagtcatgtgctctataccttcatgttggcccatcagtagattatttcagctaaataaaaataggcagtatgcaatgaagctcagatttccttacagtaagacactttaaagatcctaattactacctcataagtaatttcattttgaagaatatggatttcaaaattataggcacagagatctgagattgttgattacaaacccatatttttataaatgaggaaatttgtgagtcagggtgaattggattgcccaagtttatgtgcccaataagttaagcggttagcatttctagattgtgggatatatactgagaatgcattacaatgattaccagttagcaaatatcatgggaaatctaatcttaaaaatccagaatcactcaaatggtagagtaagtgtgaaaatctttctcccacagtcttgaaatgcctgtccctgctagactttgtacagacggtctccagcttgtcgttgctgcttaaaagcccctgtaaatgaatctgtggtgcagctccatttcctgtgtattatcctcctacgtgttcctcctgaagctgcctgcagttctgacaccctgtcaacacaacccatcaagctctgtgtcttgcagttttctagctatggagctgataacttgcaactagaaattatgtatctgagttgtctttccaaatgtgttgcaaaggaaacccaggtaatcgttaaatgcttgattgaagttttcctcacattgctattatccgtcactgcatttatagtttcccagatgtcacttgggccagacatgacgtcattggcaagtatttctccaattcctcaagtgtatttgaaactttgtcaatactaaaccattgctatggttcctgaaataggttctttcattcctctatgacataactattgaagaattaattccttctgtactgttatataaatttacaaactgacaacacatatttttagaattcaacagctaactttcttcagaactttagtgtaccttagtagttgaaacaggtaaaaataatagagaagtgcactgtagagatttgtaaacagggttaaccacaaatttggtctactctccatagtaaacactgtattaattgaaatggtacaactgtgtgaacaaatattgccgagaatttgcccttccctgtgaattttcttagaagatgttatggtttttactgaattataatcatgtgtgtgcatttgtgtgtgtgtttataagactcaagtgatcacattttagactttaagtactatgttgcttatggaagatgtatttgggtaactttccgttttatatatggctcatagattatacatttgtttcatgcctctggtcaaaggccttagggtggtttgagtgagaagcctcccatagacagacctgagtatttcaacacttgatgctgatgtcactatttgaggaagtttaggactttctggagaaaccattgcactgtagtcaggcattgagagtttaaagcctcttgccacttccagttcaccctctgtttggagcttgtggttaaaagatgtgagctcacagcttcctaatcatgctgccatgatagattcttacccttctggaactgggagcccaaggcttggtcatggcagtttgccaggacagaaaagtaactaatatagaccttgacaacttggaattgttgacatcttcttaggatgtagcaattggctccaaaatctgtaactctctctagttccacatttaaacactaaattggaagtgaacagtaatggggctggactgtaaaggaaaggaattgaacttggctcactacactctttcattatttgccatccttagagttgtgcttgtttttaaaacttcaaatgacaggtgtgttgcaggatgcactttcattgagtaaaaaaaattactttataataaccatgctacaaaattattacttggctcaggggtgtgactgtcatttaggcaatacttggaagcagttcttcctagaatactagtgaaacaatgtttacatatttttctcttttagaatggttgcagaaaccagagagttgaataccaaatttttttttttttttgtgtgtgtgtgtgtgtgtgtgtgtgtgtgtgtggtgttgaggtaactgaagtttgtcctatactttggccctgataaacatgattcccatattggagtcaggaagctaaggtcagccatactcagtgacgttcctgatgatgtgtgctatggcagtgcagtggtgaaaggcagttgacaactgggctgtccaatttgctgaatttatcaacagccaataaaaagcctctaattctatttctgtcttgctatgtatctaaactcagcagtaaataggaacttttttaactacatattttcttcacttactggaagactaggattttccatagcaactcaaattttgtgtgagaacatatactaatcatatgtgttagaacattggtgacaaagtagttctaatgccttgcttactaaaattacatacagtgataaaacaaattatgaatgaaaataaaaaatatatactcaggaatgctagtgaagagaaatagagctcactgttgactttcactagtaactggaagctatttcacttttctgcttctgttcttaatggataagaatgataaaaacacgtaaaaggaatgaagtatacacatagacaatttgataattatggtagtatgtggtagaagtttaatagatattaacttgcagccatgaacatcaaacctattttctttaaggataaaatatttgtataaagatttgttcttacagcatatgtattagaaagtgggtgtttccatactgaatcaagttagacactaataagattgctcagcaatgaaagcacttgttgcagaactgctgatctgagtttgatccttcaagcccgagtgttagaagtggagcaatgaaaacaatttatcctgatgtccacatactttttgtggtataagaatactctgatttgcatagttatatatgtatgcacacagaatagtaaaatgtaatataaatataagctagaaagtatcttttaaaaattttgttcatcaaccctttttatatttgtaatattaaaacatgccctggtggttaatattttatcaggaatggatgacacttgttttatctttttaaattgactaaaacaatatgaaccataagagaaagaacaggaaatattccccagtgatgcaatagttatttatacatatatttttttattcattaagtatataggaacacctatgtatatatacgaatatatatgagatgacatgaaattacacaagcacatacaattatacaagtacacacatatatgtacatatacccatcatatatataaaatcacaggacatacgaggaagagagtgatattgcacatattttggaagatggtaggttttttggttgcattgtatgatagaagcctttgctgaggacctgggcatattacattattcaaatgtaatcagtcaccaatttatatccatttgcaatggtagcaattacctaatcttgcttgtaagaatttcagagtgtctggttatgaatgtaacatttacatgcaataattatcatagtgttttaggtaatgcatgcctcaccatgaaagaaatttatttaaatgttttagcaataggaatctcatttttctttcctctggtctaatgaaccatagggtttgcttcatagcatttttaatgtgagactattctattcattcaagaagaaagacagtttgggcagataataatagtattacagaacgagatggttttcacagtattcagccatattgatctgtccatttctattgccttttctgatacccacaatggatattttccttcctgggaccagtgatactataaaaataggctttctatctgtcttttacaaaatgggtagaaacatagagggattgaattatcacaaaaaatagtgcaaatgtggaaggctgtgagtcaccatgttagaacataaggatgcaagtggtccctaatccttcctgagtgattgccttgctgatttcagctgtccagaacattgaaggactagagcaggggaatcagctctcatatgagggaagcagcatacctctggctttctttggtaagactttctttctgaatgatcagccaccttgggcattcagaagccacatgaggaggctgaagcacacagcttctgcaagtgtatcatcaccatgaaattgtagagctgtgaactctgtggataaatctattttctttccctggtgcctcatttcctaactacactggcacttccctggcagattgtcttattcagggtatcaattgctatgaagagtcaccatgttttgtttgtttgtttgtttttctctgtggcttttggaggctgtcctggaaccaactcttgtagaccaggctggtctcaaactcacagagatctgcctgcctctgcctccctagtgctgggattaaagacgtgtgccaccaccacttggtaactgtggcaactcttgttttaaaattaaatgtattcatttattttacatcctaaaaacagttgcccctccttcctctcatcccattcccttttctcacctcctctctgttccctccaccagccaatccactcctgctctgtttctcttcagaaaggaaaggccttccatggtgtcaacaaagcatgacatacatatcaagttgaagtaggattaattcctctttctgtattaatgttggaacaggcaacccagtatggagaataggttcccaaaggctacctcaagccttatggacaggccctgactcattgctaggaggcccacaaatagaccaagctacacaactgtcacacacatgcagagggcctaggttggtcccatgcaggcttcctacctctctgttcagagtgtgagctgctacgagcccagggttggtttgtgatgaccatgacctccccttgcatctatgatccttcctttgtctcttcaacagaattccctgagcttggcttagtacttgtctgtgaatctctgcatctgcttctatcatttactggatggaggctctttcatgacaattagggtagtcaccagtctgattacaggagatgaacagttcaggctacctatccactattattgagagtcttagctggtgtcatccttgtagatttgtgagagttttcctggcatcaggtttctatctgaccccaaaaggccactcacatcaagatatctcttttagtattctcctcctcaagcctgctcccaaccctatccctcaggatcccatccaacctactcccagtttacccaggagatctccagtatttcccctttctagggaaatccatatgtcctcatcccccttggggctttccctgttacctagcctctttgaggctgtggactgtagcatggttattctttactttaaaactagtatctaatcatgagtgcttacataccatgtttgtcattatggatctaggttctctcattcaagataattttttatagttccatttgccttcacatttcttgatgtcattgttttaacagctgagtaatactccattgtgtaaatataccacattttctttattcattcttcagttgagggacatggagattgttcccaggttttggctattatgaataatgctatgatgaacatagttcacaaagcatccttgtggtatgattgagcattctttgggtatatgcccgagattggtatatttgggtcttgaggtagattgattctcaattttctgaggaaccaccatatcaatttccagaatgtctgtacaagtttgcactcccaccagcaatgctggagtgttccccttgctccacattctctccagcgtgagctattacttgtgggtttgatattaaccattctgacaggtgtaagatgcaatctcagaggcattttgatttgtatttccctgttggctaaggatatttaacaattctttgtgtctttggccatttgagattcttctggtgagaattctgtattgatacctgtaccccattttttaaaattgagttattcaagcttttttgatgtttggtttcttgagttctatatatatttggagatcagccatctgtcagatgtggggttggtgaagagtttttccattctgtatgctgtcattttgtcttattggcagtgtcctttgactttagaagcttctcagtttcaggaggtcccatttattaattgttggtctcagtgtctgtgctactggtggtaatagtcaggaagtggtcttctgtgccaatgctttcaagtctacttcccactttttcttctatgggattcaatataactggatttttgttgaggtctttgattcattagactgcttctgcagttatgtgagtaagtatgctttcataatgtaggacttaggaaaatcagaggcttcctgttgggaggggttggaatctattactgttatctgcttcctacaatttagctcttacttgcctgtgcatgtatgtttatacagtgtgagtgtgtatgtgtgtatgtgtgtgtgcgcgcacacacttgtttgtttgtatatatgtgtgtttgtgtggtcaaaattcaaactccagtgtcattcctcaagagctattcctcttgttttataagattgtcattcactgggtcctaagaatctccaagtaggctagggaaagtagctagcaaggctcagatatctgcttctgctgcccagcactgggattacacatttatgctgctactgttgtgtattgagataacataggttctcaggcttgtgtggcaagtactctatcaatggagccatttcccctggcccactattggccaagtggttaattctttaagaccaagtcctttcccccctttctctaaatacacctaggtggaccctggccttacacacataaagtagaggcctgtgatacttctgtttaagaatacttgcaggtacctttacagaaacaaatccactaaagagaagcacttgtgaaataaaggcagggacatggactttggacccctagattctctgtggagaagggaaatgtggagagcttgtcagagctctgtggggggacagttatcctttctgcagtgtagcagaaaggctattttctgtggtacttgacaggtgcatgagttctaatccttgtatctattttgaaactttgcttgcccagggagcaaacatctgtctgggaacacagataggcagtgattcaaatgctattccttgctatcaggagcgtggtagattataactggtgattagttggtttcaaatttggaataaagtcattgtaatcagttaaggagggaggtctttcagatctttccctctgctcattaatatcatgttatgatatttccctttgcaaagataaaccttccctttcaaaagtactcatctgctctggttctcagcagaacactaactcatattttctttgcttttactctgagaattttaaactgaactctacttgcagaattttttatctgctgactacagattaggtgcatctgccaagcatgctgtgttatgttaattttaattctagttcatcagaattactaagcatgtagtaactttgaactgaatattttattgagtttcaatactggtaaggttttaaatttgggataaacttttaaatattagccaacaaattttaaggactttgcattataacctcccagtttgattacatagaaaaatcaatgattcaaattttaatgtccataaaagtaaaaataaattttaaataggactttaccattttacatacgatgttttatatctgcagaaataaataatacttctgtcttcatttactttcatgttgtggtgatagaaaatacattgaagtaacaccttaagaggggaacggcatattgttcctcacaatttcaggtgtcagacattgtggagatatcaacgtagtaagaacttgaagcagcagttgtatcacatccacagtcaagagcagagagaagaaactcattgcacgcttgcttgccctcacctcctttctccacacttagttcagaatgtcttgcccagggaatggtgccacctacagtagatgacgtctttctacctcaattagataattcccactgacatacctaaaagccaacctcactcgtagaaactccttccaagatgtttctggatcagttggtttttagtttcttgagttcgttgtatattttggaaatcagctctctgtcagatgtggggttggtaaataccttttcccattctgtgggctgtcattttgtcttgttggctgtctcctttgccttacagaagcttctcagtttcaggaggtcccatttattaattatcaaactcattgtctgtgctactagtgttatgttcaggaagtctcttgtaacaatttgttcgagggtaccatctaccttattttctaagaggttcagtgtggctggatttatggtgaagtatttgatccatttggacttaagttttgtgcacggcgacggatatggatctatctgcagtcttctacatatcagcatccagttatgccagcaccattttttgaagatgctttcttttttacattgtgtaattttagcttctttgtcaaaaatcaggtgttcataggtgtatgggttaacatcagtattttcaattcgattctattggtctacctgtctatttttgtgccaataccaagctgttttcaggattgtagctctacaataaagcttgaagtcagggatggtgatatctgcggaagtttctttattgtacagggttgttttagttatcctgggtctttttttcatataaagttaagaattattcttttaaggtcagtgaagaattgtgtgggattttgatgggaattgcattgaatctgtagattgctgttggcaagattgccatttttactatgttgatcctacctgtgcaagaacatgggagatccttccattttctagtatcttctttagtttctttctttaaagactcaaaattctcatgatacaattctttcaataaaagggacacagaactatagacaattctcaataaggaatctaaaatggctgaaagacacataagaaattgctcaacatccttagccatcagggaaatgcaaatcaaaacatctttgagataacatcttattcctgtcagaatggctaaaattaaaaaaaaaagcaccaatggcagtttatgctggagaggatgtggagaaaggggatcactcttccactaatggtgggagtgccaactcgtacagccactttggaaatcattatggcagttcctcaggaaaatgataatcaatctaccacaagatccagcaattccattattaggcatatacccaaaagatgcacatccatacaacaagaacatccatttaaacatgttcatagcagaattatttgtaatagccagaaactggaagcaacctagctgcccctcaactgaagaatggatggagaaaatgtggtaagtttacacaatggagtactactcagcagaaaaaaaaagacaataaaaaacaaacaaacaaacaaaaaaagacaatggaatcttgaaattcacaagcaaatggatggaactagaagaaaccatccctgatggctaaggatgttaaacatgtccttaattgtcatttggccatttgagattattctggtgagaattctctgcaccccatttttaattgggctattttgtattttttgtgtctagtttcttaataaattttggagatcagcggtctgtcagatgtaagattggtgaagaccttttcccattctgtaggctgtcattttgtcttactgacagtgtcctttgccttacagaagcttttcagtttcaggaggtcccattgattgatgattgctttctgtgtctgtgctctcagtgttatatttgggaagtggtctcctgtgccaatgtgttccaggctacttcccactttcctttctctcaggttcaatgtatctggatttatgttgaggtccttgatccacttggatttgagttttgtgcatggtgatagatatgaatctatttgcaatcttctatgtgttatcaaccagttatgccagcaccatttgttaaagatgttttcctttttccactgtagcattttggcacctttgtcaagaatcagatgttcacaggtgtgtggattgattgatatcagggtcattgatttgattccattgatctacctgtctgttttagccaataccaagctctttttattattataactctatagtatattttgaagtcagggatggtgatgcctccagaagttcctttattgtacaggattgttgtagctattttgggttttttgtttttccatatgaacttgagtattgttctttcgtggtctgtgaagagttttgttggaattttttgatcgagatttcattgaatttgtagattgcttttggtaggattgccatttttattatgttgtttctacctatcaaagagcatgggtgatttttccattttctgatatcatcttcaatttctttctttagggacttaaaagtcttgtcatacaggtatttaactagttcgggtagtgttaccccaagatattttataattgtggctattgtaaagggtggtgtttctctgatttctttctcagtgcctttatcttttgtatataggaaggctacttttttttttgagttaatcttgtatcctgccacattagagagaacttttaaggacaaatattttttgggggggggtttcgagacagggtttctctgtgtagctttggagcctatcctggcacttgnnnnnnnnnnnnnnnnnnnnnnnnnnnnnnnnnnnnnnnnnnnnnnnnnnnnnnnnnnnnnnnnnnnnnnnnnnnnnnnnnnnnnnnnnnnnnnnnnnnnnnnnnnnnnnnnnnnnnnnnnnnnnnnnnnnnnnnnnnnnnnnnnnnnnnnnnnnnnnnnnnnnnnnnnnnnnnnnnnnnnnnnnnnnnnnnnnnnnnnnnnnnnnnnnnnnnnnnnnnnnnnnnnnnnnnnnnnnnnnnnnnnnnnnnnnnnnnnnnnnnnnnnnnnnnnnnnnnnnnnnnnnnnnnnnnnnnnnnnnnnnnnnnnnnnnnnnnnnnnnnnnnnnnnnnnnnnnnnnnnnnnnnnnnnnnnnnnntgtgtgtgtgtgtgtgtttgtgtgtgtgtgtgtgtgtatgtgtgtgtttgtgtgtgtgtgtgtgtgtgtgtgtgtgccagtgttcaacattgattgtcttcctcaatcaatccttacttaattttttgagacaggatttctcattgaacctggggcctactggttcagctaggctgttgtgccagaaagcctcagggacccacttgtctttgcttcccagcattgggattcaggcatatgataccacacctggcttttatatggatgcctgaactcagatgctcatgcttttgtggcaaacactttaagcaatgactcatctctagcacctcaccatgagagacactgattattgtgtagagttgttttggcccatacctgtatggacactactggcttcaagaaaccaaagatgctgctgagcactcacaggttatgctggacaattcctgtacttcaccctgtcccacagtatccatagtgccaaaggaaagaagctctgttgctgaaatctgagataaagaaactgtccacaatgacataggcagatttgtaagagacatttcattttatgtcagtgtcttctaattcctttactttgtgctgttggttgtttacttaggaatccctaataaacaataataataccttaaaatgtaaatgaaaaagaataacattgcatagtacatgtgttactctacattgcagtaaaaaatgtctcaatcatctagctaacagtttaacgaagattgaaatgtaatacactgtttgcaaagacctaggcagctgggagactgagagataaatagatttgaatcaaaaagtaactctgtaaaatattttttaaatgctctgtaaatgcagatgaattgagaaatgattatgcccacagttgacacagggaatgaagcttctgagaattagtaacataatcaggtacataaaaaataaatagctttctaggtgggaaagaggtaaataatatcaaagtgtcattttgcaaactattaagaggaccatactgtagtatgactgaatattccatgaatgagcatgcttcatatcctaagttcattgtcagtttctgggacaaaaaactctgacaaagaggcttaggggataaagggcttattttatttcagaattccagactctagtccattattgcatatataccaaaatggaaagaacttaaagcagcttgtcatgtcacaactatgtataatatgaatgacaaatgagttaatgtgtgcatacatattgctcaactcttataccacctaggctcccctgcctaggaaatggtggcacccacagcagcctgtgttctgttccatcagaaatcacaaaaatcccaacagacatacccacctagcaatctggtcagaaaaaccctgttgagattctcttgccaggtgattctatgttgtgtcaagctgacagttaaaaccaactatcacaatcctaggaagtggaaatggaaatttgcagcacagacatacagtaaatgtatggagtaaaccaagatgtccatatgtgggaaaatgattgaagaaaatatgacatttgtgggtatacaaataatagattattattcagccattaaaataattgttgagtgtagtatatagaattggaggaaaaaagcatgggggaggagaataatgagtaggtattacatacataatgaaaatttcaaagcatatatctatttaataataaaaaagaaatattgcaatttgaagcaacataaatggaactggaagacatgaaattaagagaattaagccaggcacagaaagagagatgttatgaattcttgttcccccaaggaagataaactaagtgctttcagagcacagattaggagagtgatcattggtgagtttgaagtgtgggttagtggtgttttctagaacagtagggtatgcatagcttactaagaatttgaagagttggaacattaaatattcaaagatgtagaaatgctaatttctctgatttgatcattacggatagaatgtatgtgtcaaattatcacactgaatcatacaaatatgcacaagtttcatgtgttgttaaataattagcacagattgtagtgatttgcttgttggaattatttgaggtcaaaacacaagtcaagagagaatgctattctgcaataaagatttaaacatctttactacaacatttgaaaattcaccgcaggaaatcatttctctttggcttaaaaatggacccttttcttcccatgatcacaagagcagtgtgtctagacacatcatgacccaaaagtatcttcagaggacagtgcatatacaactatttctttttatgaaaataactgactctcacagggataatggtctctggtggcagagaagagtggcatcaccagggacataaaaaataagaaatctgtgtggaaagacagatacttggctctaccacattttgttctttcttcacataagctctaagtggtaggctttggatagattcattactcaacttttgatgattatggaatcttgaatcttaatgataattattcatgttttttgattaaggttttccaaagttgccttgataggttaaatgtcttttacagttttacttaccttgagtgatccctcagccagctgatcctgcctgtacagaggtagtgagtgaaagacattgtgatacagataaactcttgacatgtgtccctcacaggattgataactcagacattagtaagcaagaatctgagttggcattcgatcatttaaggtattttatgaatcagacaaaagacaccctcctctcactgctctaccatgtaggaaagccctgttttttccttgctatctcgaggaactgttataggactagttaatggccatggctgccagctaagggggtggttgcaattcatacccatttacctccctttactttatgtatttgtgttgagaaaagttggaatgagaagcaggattagtaatgagcccttaatgtggttacctctagtgagagaaagaatagggctggagttggacccattatcactctgtcaacagttcttattaagatggtggcatttagacacttccctggctctcagtctgtatgtcgactgcatggacatgctccattatctctgaaggactttatttgccctcagaggtatgcctctgactctacttgtcaccatacccatgtactgtacctttctgtattacaaatctagccacatcacctcagtctgttctcctttttcagccatcagcatcatttagcaatcacatgttttgtaagatcatggatggcctttccttttaggtatctataagcattcagttctatccctatccttcatttacccacaccctggagtcataaaattaggagctctgccttgtgatggtgatggtgatggtgactttccatcctacctgcatgagctggggagaaaccattttgctttgttccaaggaacttagctttagagaacagctactctttttgcaagcaagtattcttgttcaagctttgtgggagttcactatgtcagctaacactcagtcagcatttgaaagcacactgtgtgctaagaccctgtttagatctgtactgcaagcctggttttgtatattgtgctgtgtctcagaaaaggtaatattataaagaaattaaagaaatcatatcactaggtcttctgtgattgaatcagagttaagtgttaagtgagaattctctgtgtgaaatgttgtaataatagaatttagggagcccaatgtgagggttccagggatgtttgctaaacattattagatcgtgtggttgcacagcaggtttgattatgccttcccatctcgacagcagcttttcacaatggttgtgcctatttcatcactttactcttgtaaagtgtttgcgttgtttttctgaaagttgtaagacttatctcccgtgttaggctgaatttcttgattatggcatcttgattagtcatacccgtaggtaaggaagcacttctgtttggtgattttctccctcatcaggtttatattatgattcgttttatttgattttgattagaaccttatttctgttttgactttaatgtccagtatttttgtcttaccgtagctgttacaaatattgtgtgtgtgttcatgtatgttaatgtgcattctcactctccccctccttccctccctccctccctcttcatccccaacagccccgtgtgtgtgtgtgtgtgtgtgtgtgtgtgtgtgtgtgtgtgtgtgtgtgtgtgtgcgcgcgcgtgcgcgtgcacaagcatgaattcagagggtactgtttaaaacttccttgtctatttccaacttatgagttcctgggatggaagaacttgggtcatcatgcttggtaacaagtgcctttatctgctgagctatctcactgtctgatcctattctttagttttaataaggtgatttcttagtttctcatattttgtgcttgtttcatgtgtgttacttattataaagtttgttctcttcatgcatatatattcaagttgataaagcatatagaatgtctaaaaacaaagttaaaaattaatttgtatataatgttatgatgtccatgtaactcaaattttgtcactgcaatataattcttattataaggctatactgggataatttcccaaagaataagaaatcattttcaggaaatcacattgttttaataaacagttgtcatccacctgtcattttggtagcaacttttataaattagtatttatgggctccatcttaacaaaaatatttcaactaataaagacagttgtttgcaatcatttatggattttctttagagattcaggacagtgttagcagttctttttatcttgctgaccggtggagatgatatgctatttaactctgttcagaatggtcttacctatgcaaagtggataaagagcctggagagtgtccttgacgttcttgacctattatcgttttaagtgtttcatgtgaggacttccatttcaaccaagctgcttgagtgggataaaattgaaaagtaaaatgaattctcttcccatcattggttgttatatattagaactagagcctttaattagcatataagtgaggaaagtgtcatctccttcttaaatagggagcattctcatctggagaaggtggcagctcttacattaaaacctgacttagcaaggtttctaacagttattcaaaggccattctatctgaggatgaagaatttaaccaaaaaggtagtgttatctgatttagcattataatggaaagaattggggaaagaaaatagctatgtaaaaatatgtatgaatataaaaaaaatggcaggaactaaggtaaaaaaggaaggtatgtcacctagtttttcattgctgtgacaaatgtacctgacaagactcaattaaaggaagggatggtttgttcaaacttatagcttgaaggaatacagtccagtgtttttgggaaggcatggcagcaggtgtagaaagctgctgattgcattgtacctgccatcaagaagcaggaagaacaaacaagaagtagagttgagctctaaattctcaagcttcccagccatacatttttttcctgaatggcttcagctcttaaaggttctaaatagcacctttcctaaatatcatcatcagctggatgtccagacatgagagtctgtgcaacatttcactctcaagacataataggaaagaactatatttttctaaagctaattattatttacaagaaaatcagactaagatgcaagtcttgaagagctattatcaggattagaattcatggaatgaggtgtttggaattcaaaaaggaaaaagagatgggggaaggaggaggaaggatggagggggagagagcagcctgacttcacgacctttacctttgttaagagttggctgctgaataaggtcattgcatttcttttgcaagcaggggaaatctgttagagtatttgagcatctctaataatgtattattctatagtttagtaactaactatatggattgctaacacaggtttacataagctgagaagctgattgcagtaacctagcctgatgtggtgatatattgtttatgatctaataaagtcaatgaagattagaactcaatgctagccacattagacagccacagaatttgggtagtgttgccacacacctttaatgccaggactcagaaagcagagacagatagatatctaggagtacaaggccacctagggctacatgagagtgaatcggtctaacagagaagcagagctcacatctttaaccccagcactagcgagtcatctaagaaggagaccagggtctcatgcagcattcactattcagtctcagagcaattagtctcctccaggcatgttgaggtcaggatctcactgactttggtagaggtcagagctctcttgtgcttggccaccttgcttttctgatcttcaactttaaccccaatatcaatactattattggtactacagcctggtgttaaaaagaaactcaaaccagtatcagggtgggttggaatgtagagttggaataaaagaaagtgagaacatgaatcaaaacaccatcctatgcgttctcatgctcctcgtgccatgtttccaaccacgatggactgtccctgaactgtaagccagagtaagccatcacttccttaagtagcattttgtcacatcattgagaaagtagctaatatagcttctctttgtctctaggagatgacatgattctggcttctcacaaagacatcaccagtgaatatgtatgagtgagtggtgtcttgagtgacaggagagcccattttatgtagtcaaagctcttaaactctctttcactgtccttttccctttcaaaaagaaattccacagaaatgttaaggttgcttttaaatttatgtcatctacttcacagggagtattccaatatagcagctattaaaaattctaatagctgtgtgtttctgtatgagctgctatttggtgtatgtcttgcacatattcacttactcacacatgtatcccccactttatttttcccaggcctggggatataatacaaagccttgcctgcaataggtaaattttctcagtcccaaccttcatcctctgctttctgagaaatgtctcagtgttccataccaatacttcaattatttttatgtagcttttagtctggactattgtttacctactatgggctgagtgcacctggaggccactgtggtagtgagatgcctttctgtactcatggtaccggtgttatacctttcagaaggaaagagatccagggttgctacaatgttctcacttactacttttgatttaaaggccatgtgctgtttaattttctccaaacttgacacaagtcaggggcatttgagaagaaggaccgtcgactgaggaaaaaatgcctccatcagattgttttagagaaaagtgttgggcattttcttgctttaatcattgatttaggagtacccagctcaaatatggatgatgtcaccaggaagaagtggtcctaggttgtataagaaagtaagctgaacaagctatgagaaacaagccagttagcagcatctattgatgtctgctttaattcttgccttgctttagtttctatccaccttccctccctcagtgatgaactgttaacttgaagtgtaacatgaactaaaccttttcctccccaagatgctttttgtcttggtgtttttcagcaacagaaatctggctatgaaaggcttcatgtagtttttagaggtattaaacaaaagcacatgccctggctacttctgtgtggctgcatggtgagatgccaagtctagctgagtttcacctttgtttgaaataagaacatattggcagtctctcaatggttatgatttgattgattagttccttgtctagtggcaatgaaactggactgaagacagagtggtaagatgactgttcttgacagtcaatacgtttagttaaacggtattgccttgtgtctctttctgtagttgctctgtttggattgcagatatgctcaaggaggtcagagaagtagatttccgagatgcatcacatagatatctcttggactttgattggcctaatttctccctcctccccaatgccaaaggaagaataaattgatgttaagtaaataaatactgtggaagatgctacaatgagctccataacttattctaatggtagctcactgttcagtctctcctctgcattttctttatctctttaccaataagtggtaaaaatgtgatatgtacaaataatgcagaaaggaaaacaagggtctgactggtgagcctccattcatcagaacatttgaatttcatggcagaggttgggaaacattttcggtaattagcccaataaatttctagtctaatttcacatctctgatgccgtgaaataccaaccacagacagtgtggatgtggctatgtttccattgcaggatgtttggattctgtgcaatattcctgtgttgtgagctattaatttttacttttttaaagcaatcattattgttcttggtttcgatactataaaatgcaagtgaggattttgtaaaacttaatagccatagtttatcaagcaggggatagaaagaacaaaacctttgggcatgaaggtttgacaatacttacaatatataccatgtataaattcttactctgtttgccattctgcaaagtactttatacatccatcatttaatctgcaaaggaattctgcatgtggcattcttaattcaatcttttgagaactaatagtaactcaggtaactttggaattattttccaattacaatgtgattctggtaaaccaaaaaccttgtcttcagcagcttttcagatgaaattaataagtgaatctactaacgtatgaccttgcttcctgattgtaatttctttttttaatgacatgaaagagactagagtgatcatgttcaacatatttttatattacttacaatgaatctacaataaaatttgatgctatgcttgatttaactatccatgaaattgcctaataaattctaaaaaaattagctctcctgggtcaggtatctgacaaggattagggggccctcattctccacatttccccacattagaattcttgttctattaacccatacttttatgaatgaagaaagcttatgtaactttggctgtgactctggataaagcaatagacgtgacttatttctttttctttatttttgtattgtatgtgtgatgtgaatgcatgtatatgaatgggcagcggatgtggatgtgtgttgggggcatgagtgtttatgtgtccatgtgcatttggagggctcagttgttattgggtggctctcctaattgctctccatctcattgagtcaatgtattgagtcagtatctctcacttgaatctagacctcatcatttgggatattctagttagacagcttgttgcagagattcgctgtttcacatattcagagattgttggtgaccgccacgcccaatttaggagttatactggtgcttgggatccaaattctggtcctcacactttacctgacaacacatttcctcaacctcaggcatgaattatttttaaaaaaattagaccccaatagtatagaaaacatgtatctttcccattaaataatactgttgaagggctggaaaatgactcaataagtaagaacacttgtagaagaattaagttcattgatagcaccaatatccaggcacttaaaattgcttcattgggaactaatgcacttttaatgcctctgtgggtacccctgtgtgtgtagtacacacacacactcactcacacacacacacacacacacacacacacacacacacacacacacatgcaaaatcataatatgagtaaaagtaaatattataaaacttactctgtgttctttaatggattattaaagtatgataaggcaaaaatacatgtatgagaatgcccccatctttattttaagtgttttttttgggggggcatggcaatgctggtaatgggtagcaagggctagggcattttcccttcactagtttaacactacatgaacaaagtgaagaaaattcaaatagtacatatgtgttttataataagaacattatgtgctgattattgtgtgagctaagaggcaaaattgttaatttattctcttattggcccagaaatggaaatttttcaccatattatccttctgtttggagtcacaatctccagggttaaactcagcttatgatgttcacagtctgtcatttctccaatcaatagctagaaaattgtgctctaatggtaagcttaagatcctgtgtcatgtctactttgttgtatttataaattttatgcaaagaacaataacactagatagctatatatgaacacatacacatttacttcctaaatattgtcttgtaaaatcagttctttacagtaggtactacatatttttgaaggctactgttttataaaaacatgtcttatttcttctaagtatttttatttatttgaaatttcaagcatttataaagttatttattcatatccattcactactacctcccaacaactccttttaatactaccaaatcatttcctttttaacattataacctctttctttttcattaataacccgctggatctaatcaatgctgcccatatgtacaaaggtgtgttttttagagtagtaaattcacttactgaatgtcaaacttagtgctcaaaccagagtacatctgcaggaagccacactactattatcattttaccctcttctacctaatatctttgatgtgaatggataccaacttagttttggaggtatgatgaggtataatgaaaaaacttcttatgttttactataatatattagtacagtgaggtagacccgagttttagtatgccagcaccaataaagtgggaaagaggatggttataagttgtttagaatatttttatctaagttttcaaatgaattttctgaagttgcttttatattaaatttaagtataaatctcatacttaaattttaagtctaaagattttaagtatgaagatttaaatatgaagctttaggtagagtaaatcacatgaatatggaatagaagcacacagtgccatttattctttcagtcatttactagttttagggtgcctgctatggaccatgccttgagtgaggccattagatacatagtgatgagcaacgagatttgagctcatcaaaagacacagtgggttaaatgctcaataagggttggagatgtggctcagtgggtgaagtgcttgtcacactgacacctgaagacctgaacttaattccacacaagccacttaaaactggatgcagaagtacacatctgcattctaagcatgtctatagagagatggaaaatggacacaggaaagcactcattcatatatgaacgtgtacaccacagggtaagacagagagaggggcggaggtgatttcttaaaatgcttactaaagcacttatgtctaaagggactaataaagagtgaatatacaagacagtctgaattttattggctgatatagaagccatgcttatacttgtgttgttggagtggaagaagtaaaatgggagtgattatgatcacaaagtgttcatgggattaattggccaagtgattagctgatacgttgatggagcatatggacaggttagcaaatatagcagagtaaggagatagcctcaattaccacaaggagctgttagtctgcagtgctgctcagtggtgctcatagagtctgtagttttctcagacaattgaactcattgtcttctttgttgacctccctttaaagaatccttctattgcatcctatccagaggactgtattccctgtcacactgactaagattataaacctcatcggctgaggtttataatggtactgtttccctccctcattttgtaactttaatggtgtcagttgaaaggcaatgccttctctgtttgcctggacatattcactgcctcacatactgactctcaatacatattcctctgatttgtaagtaattgtaagccacctacttcagtcatgggtcttgtgcaagggcaatatacattcttattgacttgagtcttctctctggaacatcattgttattttaagaaaattatgtattaattcacttgacacttgttatccaaattggatccactgtgtcctttaatctaaaaaagatgcaaaatccttcctataaaatgcctaaagctatttgtgtaatctactgacatagttacaatcaccttaaattatttctagcacccagtgtaacataaatttgtatataaacagtttctatgctatattgttgaggaaataatagcaacaaaataaagatgttcacatgttttgtgtagaagaattaattttttttagccttcagttgaactcatgtatgtgaaactcatagataatgaggtccgacgatttcaaagaaagtttggattgttagaaatgatagagaaggaaagccaagaataaatatgcaaatgggtttgtagtctttgtaaaggcctttcttctacttttttattaattaaaaaatatatatgtatgtgcatgtatgtgggagggaatatgcccatgaatgcagtacccatagaggccagatgagggccttggatcctctggagctggagttggagttggttgtaagtggtaccgtgtgagtactgtggactgaacttggaccctctcaaggtcaatatgtgttcagtatctatctttccaggctgttttgttaatttttaattttcctggcatgtacataaacattatctgctagagaagtaagcagtcaaatgactatccatctttctacctctgactttgcattgtcctttattttttacaagctctgctgaacctggagagatagaagttttaaaatattgaaaagattcaacgtagggctctcttggaacaacttcacaggctttccgttgtcttgtgaagattttcacttgctttgtttatcgaatgtcacttgtgaatgtctgttgcattcatcccattgtcatcagtattagtactgagaatgaacaatgatgagacattgtcaggatgctaacatcttcctttcttcctgttttgacattgtgattgaaatatacatgagcactctatcaaatgagctcccaacagtccacttgtcagcaagtggctagctctttatgtgctgtatatgggtatggctctggctttctggagaagagtaggcttgcttgtagctggcgtacaagcaagggtgaattcatacatggcttccatagttaaggagcagaaagcattcttgacacaggctttctgcttactgttctccaactgagcctgatggttacacattactgtctctggccacagtggatgcctttatgagtgttctagcagtactagctcctactacactgacttgactttgacgtctaagcatcacctcatttctgctgctgctcatagtaccgaagtttagactaatactcagggacattgtgcctgaatatgtgcactgtacctgtgtgtgctttcttcttactaggtcagaagatctgaatcttgtctccacatcctttaagtattgcttctgatgggaagctttccctgtataatttggatatcagcatggctgcaacatggattgcctcaacctctatcccaagtctggtgcatgggttattactgacttcagtcttgtaaaacccaaccaggaatatcatggtacagaaaggcctatggcagcaccagcatcactctctatctggctttctgagtctattatccattttctcctcacttacctcagagttttttattttttgatttgcatgcttataccgtgataggcagtacatagtagtgtacagaccatggaaaggtaaccctggagtttatattatggttagatgctctgtacatccctggagatgtctgtttattctcttattttaggttgttgtttgttctagagccatccctgggatagttagacagagcaggctcagcactcctttttaatctaacaactcactatttggaattctttcatcttctcacattaatgacttttgtaatctttccattaaaacatttattactaatagatttaacatggacctcccacagtcctccttccccccttgatacctgctatgtgtgtccatgaagaagtagtcaaagccatttaatgaatggatggtgttgctaatgaagtacatgtgaacccagttacctctcacttctgctctagaccagaggacccattggtttgtatctcctcaaagtgggactgcaaggtcaggctaactttgggaaatatgctgccataaagaactatactctaagtcaaactggcactgtcttcatcaaatcatctctgtgatttgcaaaagttcattgtaattgggcatgttgactgttgatgtttctccactgaaggagaggcaaggagggtctttggacctcaccttatatctagtgtgggggaccgaatatttctgttatggaatattttggggcccagtctctagctcctgtaaacaggggcaccggaaagctcctggtcaccatagtattgttaattgccagtagggctactactgtttaccatggcctcagggtaatatgcctcctaatttgcatctctgtagcttaagccttgagtaggcccatgcctgggccgaggactctgcctacatgaccaagagttgtttaggtaatagaatcacttgatgttagctatatgcattataatagatgcttcctgatgttcctgcccttggaggactgtttaaatggacttctcaataaactgtggctgctcagcatcagctgggagccctcctgagttgatatggtgtttcctgtctcatcattagcatcgctgggtaattaaactttcctagtccacacacctccactcagaatcggacctgggactatacggctggctcctttcacagtcctgaagacatcggtcccgaacaatctagccactctctttaaccagttgtatcaagttttaccccaatttcatccaaattcatgggtaagatttgactatataggcaagaaatatcttagggaagggccctatctatgtggccatggatgtgtcatcatatgtgcagattcagaacttctagtgttacatctttaaggccactcacattcctgcctatatcccctcacccattggtctgtaagtatgcctttcgaattcattagctcccaagtgtaaattttggtgaaatcatacctcactttgtttttagggagacaggtgaatggacattgtttgggtttctaccagagaaagaatttagtgacacatgtatttgacatatatatatatatatatatatatatatatatacacacacacacacatatatacacaaacttagccaacagtttgtagatatccatgaataacttttttgtagttgttaacatttaaataacagcttttcatttttggctctgggtaactttaactcttttgattagaaaacactgaaatgaacttctggtgaatttcctatcagatatctatatctatctatctatctatctatctatctatctatctatctatatgtgtgtgtgtgtgtgtgtgtgtgtgtgtgtgtgtgtgtagctttagttaagcatttatatttctttctatatagcagtaatagagatagattgattgactaatatataaatcactgattagagaaagaagaaaatggaagatctcagaacacatattatgatttggtttgtaattgtgagttaaaaaaaatcatggctataaaaaaacaagtcagttttaaattgtctaattaggcaatcagttgtgttgcttatctgcatccacaaagagctcataggaaaccggaagtgactacatgttgcctaattagtccaattaaacacctgcctaagatttcctagcttacaaaactccccactcttaaaatgactagtgcactgctaaaaatataacttccaaatctaagtgttttatttgaaaaattggggaactattctcagaatactgtatgaaaaaaatgtaaagaaaatacatgtgaacttttttcttcagctttttaaaagaagtaacactttgtttccatgtttctcaaatccagccgactgagttggttgctttcagagtgttagtcaaagagaccacatatcatatccccatctgagtcctccaagtctttcttgatttcatccttgcctgggagtagagcagtggcagaaacagcagtggtggtagcaggctcagcagcagcacctaggaacacagatagctcagacaagaagccttgaccttttcagcaggtgtaatcagcctccaaagacaaaacaaggaaccatttatgtccactgatgatagaatgtgatacgggagcaacagtaagcaaacataagctgacaacatcattagcattctccagaaagaagagtttgcagattcttgagggttctttttattttagagctgggggtaaaaagggaagcaccaagagtttgattggtttcagtaacacacagtgaatgcatggctagttagagttcacatccaaatattcccagccatcaccttatatgtcaggatcctgtcccacatggttactgattatacatccaatatagtagtagatgtcactttagttaccgagctaatgtgtctcagataaactgctgcatttaacattcaaaatctccctgggaattcaatgccattattatttcaaaatagaaaagtgaatatgagattcagtctttttccacccagataaggagtggaagtctccagaacctggggaaattgctgtggacctgaggtagattctccaaaactcacctaaaaactcagatgtgctggctagatttcattgcactcaaagatgctatacaggttactggtagacagaagctatgattgatttaccctgcagtgggccatgcatgctacagcactggtctgtcaggaagttgtaatagttgcaagactgtttggaggctaaccaattgttttctgattagatttgaggcctattccaaaggagggaaatcatgtctggtgtgaccaacctggctcaaagatcatcactgggcaggtcataggccttggtggggacacctactactgttgttttgtgagacagccatggtgttaaactgcctgttaaatatttatgttagtatctgtcgatcagcactgttcttaaccttgctcagagaagcttctctttgcagtggacagcagtggatgcagaaacaaagacctggtcaattttctgagagcaagtggctattgagtgtttgccacaaaacgagacatctatagcaacccacctaaaaaattcagggaacatcgcagaagagttgggaagaattaagagataggggatgcgaaagagggctatgacatgttgtctcctagacaagacatggctgttgaactgatgttgaatttatggctacttaaacaagagctgtacaagatgtagactaactatagctgttttgtaatcttttatatttctgtgtacagctatcagattgtccatgttcttataggaaaccctaactaagacatttaaaaataagtaagacatgaaagttggaagggtacttactagccaggaggaggggccgaggaagtgggagtgaggatctagacatggatgtgatcaagatacaatgtatatgggcataaaatcattaaatatatgtaaggtattacagatatataatgttctttggctattccattcatgtacaaaatgcattctgattactgtcccccttttagtctcctcctcctcctgttaagcccctcttccctttcaatcattcatttcttgtttgaaacccactgtatacacacacacacacacacacacacacacacacacacacacacacacacggaaatctccatagctgttcctctcttccctagatcatgtttctcccttttacagtcttttcacccaacaatgcttcattcctgatcacccaagtcccatcctacgatttctgtgcactagtgttttaaagagaaattttgtctgtctttagatagaaaatgaggtgcctcttttttacaaattgtccaaataaaggtacagaagaagaatcttgacaagtataattacatcctgctcatttacccctccttgcatcaacaaatccccagagccttcagagaagcaaagcttaaggagcacggtgcacaccaaggcagtgcattcaagtgttctgtccgtgaagctgacccacagtaaatgtcaacgtggtcttttctcatgctattggcatttcaccagcagcttgtagtttaatgggagaacaataatgtacacgtacatatcaaatccagaaaatgtcagcagattatgtaattatctctttgaaaggctaggaattcttttaaaatagagtatgtccttcatgctctgaggaaattctacagacacaccagttagctagccataagaacaattgatttttcacttcagaaatttatataatatgtctaatgggacaaacctatactcactattggcttaagggataaacagcacatgtcaaataaatcaagtcttcaagtatttgaaaggtcctgccgcctctattgtgcattttaaaaatctttctttgaatttgttcttgggcaattctattcatgtataaattacaatctgattactgccctctccctttctagtctccttcccacctctgttaagcccctcctccctgcaattccctttcaatcagtgggtttgaagcccactgagtttactcgggattatctacataattgtggatttggaattgtacattggaaccttgtgagtgaatcagagtgtataaagctgaatacaatgacagtttctcccccataatctgtaagtaaccagtggttaaggtccaatgggaacatccctgttctgtggtgggctgttagtaggctcactcttgtgtatatttattgttcatataaccacagatgctgtgagaacgtgacagcattgtctgtgcaagccccctaagatagaatctcacagccttgctcctcttctgcctcaaagtgctttccaccctgtgtacttaatgattcccaagcctcagagcagatagtaaaaaatcctctaacatgcagtttcttttcaactgattcaagaccttctcctagaaataaggacagtacttttaattcctaattcacaaacacactatgtgtaatgggctgggactaattggagagtgttctgtatttggattccattaaaaatggacaaagtgtcactattaataatttgatatttttgattctagaggagaaaaatctagaattaaaatctttcaatcactgaaggattaatattttggaaaacaatttctattcattgttttgtgagatattttctgggtgtgcagatggggaaatatgactttcttgttgctcttagtaggttttgtcaagtcctgtcaagttcaaaagtttgcaagtgctagacactatatatgagaacagtgatattgtctccatgccaagaaatgctaattgattatatgtgtgtgcatatgcacatattaattttatatttaatttcagctattattgttgactttattaatacaaaaatcagtcatttgattctctaaaaggtgacctgaaatttagcttttctatatattctagttatcagaatttcacaacaatatatgtaagatatgtgtcaaatagaaaacctgcaaaagtcaaggcacaggcatatacagagatataaaattataggcaaagatttctactgaagtatgagggagggggggggggggggaaggagggagggagggagggagagagaaggagagagatagagagagagacgactttgtgtctttattgaagcaagaaaatgagtacattatatttaccttatgagttgatgcttttgtttactttcaattgtatatttgagtacagttgcacactgaggccagaaaatggcgtcatttcctatggagctgtagtcatagacaactgtgagccatcctatctgaatgctgggtgacaaactagggtcctccggaagagtagtagcaagtgatcttaaatactgagccatctctccagccggtgtcaaaatgatgtttatagttgtgctgtgctgctgatattttccttaatacacttaagacatttagtaatattaaggaggttaatcctatgcacccttattttggagtagctggtgagtttttataactcaagatgatcatgatattgcacattcgaactacttttgttttgttaatccctagaaggtttctttgttgtggagtttgccacttttgaaagttgcctccaactgataaatgtactaagtatgaactctggctgacaagtgagataacagttgagagggcaagtaagaaagcatgtccttcacctatgttaccaccattgctttggtgatgatttagaccaactccttctccttcgtggtgccatcccctggagccttgatctttctcatcacctttccatgatgtgtttgatgtgttcctgattcttcaagattactttaatctgcattgacattagtggttactgtgccagtcctctactgagtaggtctaagtgacaagaagacttatgaaaagtccctccaatactttctgatgcatgtgttcaaattgtcatggaattttgctgatcattttagttcaaaggaaagggacaactttaaatttctttgcaggagaaaactttgtttttatttataaatgctagttatatgaataatattttcaatttttatcaaattattctcagatactttcgtatacatacacaatgtaatccatttgatctctccacccatcttctcttatctcccatccacccctaccaactcccacacctgtctttcctaattgttcctttcccaaatgcatgacttttcattttgttaaaagacccactacctttaatcaggtaatctgtgtgaacacaggtatagactgtgactccccatttccctgaacctatctacaggaaatagttcaacaatgagaaggacagcaccctgaatccctcttacatccttttcttgctgttaatgggctcacttttggtcaggcacagtgtaataatctgtagtagttgaagattcattattataatagctacatattgttgggaagatggcatttcagtgcccttagtctccctccccactctttggtgtgatcagaaatagcagatgcaggcttggcataatctcttaacagttgcaacacttccctataagtgcatcatgcctgcaatctatggatagttgagggacacttaaaatacaaacaatgatgattaaaaatactagaagatagtaaacaggaagtgcatacagggcctaaagaggccggaagagggcatcggatcaccagaactgggattacagacagttgtaattgtgtaggtgctgggaaccaaacttgggtcccagatagggcagtaagtggtcttaactgctgacccatctctgcaaccacaaagaattttttcagttatttctgtttaagtgtatgtgtgtcagtgtaggccatgtgtctcagggttgctgtgaagagacactatgaccaaggcactcttataaaggaaaacatttactggagtgtctcttacagtttcagatgttcattccattgttgtagaggcaggaatcaaggcagcatacaggcaggcatggtgcaggagaagtaagatctgcaggcagcagaagtagatagtatcactaggcctagattgagcatataagacttcaaagactggcctccacatacttcctccaactaggccacatatactttaacaaggccactaatagtgccactgcctatggaccaagcattcaaacgcatgactcaatgggggggcaatacctattcaaaccaccatatcatgtatatgtggcgggtgcccaaggcagcaaaaaacggctgtgggatactcagagctagagttacaggcaattatgaagggccacatggctctaagatctgaattctagttctgtgcaagaccagcactctctcctcttaatcgtctcccttgatattttgtaattgacatttcttacatttggtaatgagaatttcgacttgagaaaaagcttgcatctgacttgaatgactttagatttgtgatcaggttctccatggtgtagatgtgaaaacatactctgctttttgaaatactgttcagaagctatcaagttatacctaggccattgaaatttcatttaaaaaatggttttcttttactgtatatgaacagtcatgaccatttaaaattgtctcataaggaaaagaggaaatactaccagcaaacctaaaagctttaatctacacaagattgacataaaatattgaaataataatctaaaacatcaaagtaaacagaatgcattgtgtagtgtgtatgtgcacatgtgtgtccatatgtagtccatgctaataagcaaatacttttagcatattcatttgcatatatgggaataaaatgctttagttatttagcagtcattcattcctttttttcctccattttttattgaattagaaacaagattgttttacatgtcaatcccagttccctctctgtccccttctcccctgtcccccactaacaccctacttatcccaactatttctgctccccagggagggtgaggccttccatagggagtcttcagagtctgtcatattctttgggatagtgcttaggccctccctcatgtgtctaggctgagtgggctcctatgctaggtataagtactgatcgactacaagaggccccatagatttctgaggcctcctcactgacacccacattcatggggtctggatcagttccatgctggttcccagcaatcaatctggggaacaagagcttccccttgttcaggtcagctgtttctgtgggtttcaccagcctggtcttgacacctttgctcattcctcctccttcctctgcaactggattccagttcagttcagtgtttagctgtgggtatctgattctacttccattagctgctggatgaaggctctaggatggcatataaggtagtcatcaatctcattatcaggggagggcatttaaggtagcctctccactgttgtttagattgttagttggtgtcatccttgtagatttctggacatttccctagtgcctgattctctttaaacctatactggctccctcttgtatggtagctctttttgctcttcgctattcttccccctacacaaccttcctgctcccttatgtcctcctcacccctcctcttctccccttttcattctcctttactaataacattatatacctcataaaccatgtgtagatatttaataagaatgatataaaattttcaggatgatatttactaactacaaataatatgtgaatacagttaatattagctacagtgcctggttgctcattaaaatctcacacatatagctgattagaaattttcttcttattgcaaaatatccacgtgggcttttctcactcatggtctatattgctccaagggaaaggaactctgcatttttatctttagtagctggcctccaaaattgccggaagggtgatcataatagcccaagtggagagacccgcacattgcactttgtcatgtctgtaaatcaaccaagtcatctccaggtgaggctggcaaacccccacattcagttaggctgtctgggaaacaagttccagtaatgcccccccccccccgccagtctcctcttcagtgccggtattactgttgcctgcctcttttcctcactttcgcatagaatctcggggtgaaactcaggtccttcagctcctgcaaccaccccataaacagcaggcctgtggtgacatttaggggaaggcaggcttggcttaactcagtcctttaattagagctgattggaaaatattttgtatttatcctggtttcatctttctttctagtctcctttgagcagtctggttttgttttgctttaaagttggtaaatgcaaaacagtgaatcatgagtcgagtggagtctttccctaattattttagggactttctagacagcatgggttttctgtcatgggtgctgatgactaaacaacttaagatttttaaaaagacaaatgccttcctactcactttatatttctcgttcaaaacatttgctgctttgctgagaaaaggcattgctgctttgggccacagaaggacactgtgatcagcaccgagtatatgtggcaccgagtcccacagattcaaatagatctgggagaaggatgctgcctgtaagtactgctgtggtgacatcaaggctcactggggttacctcagtctgtagtggtatttgcataaaaaagcagtgtttccacatgtttgcatgtgaacagacttaccatcatggtgcagtttaccacctctagtctgttgttctgtttgagtcagtagcattggagaaacagactaacatatagggtctacaaatttgtaatatttttcaagtcattataaaaataagtcataaatattacaaatttagtggccacagataaaattaatactgtttcaaggaagtgccaatatgttagtggtaacatcatacaaatacccatttgtaatgacaagattgtctcatcagtaactgctcagtgtccacgctgagatgcctatatcaattggtgtttgcatgctaccattgagaagagaattacacaccaagtcaataaggacatatttcaaaatatgtttgtatgaaaacatcacaatacaaaccattttatatatcattaataaaagtaaatacaagtagaaatttgctatatatcctaaagaagttattaatatgagaagagataaaaatgattttcataggttaaaatacttctaagacccatcatatactttctgagtgaatggcatctcttgtgtgtcagcagtcagactttgactcttttttttaagatgctcacaattacatgctgctctttatctttttttgtggagtgggctcccaaagtccatttgtatgctaggatccactaccagaggccccacaggtgcccaaggcctcctcactgacccccacattcatggggtctgcatcagttctatgctggtttcccagctatcagtctggggtccatgagcttccccttgttcaggtcagctgcttctatgggtttctccagcctgatcttgacccctttgctcatcactcctccctcacagcaactggattccaggagatcggctcagtgtttagctgtgggtacctgcttcttccatcagctactggatgaaggttctaggatggcatataaggtagtcatcaatctcattatcagggaagggcatttaaggtagcctctccactattgcttagattgttagttggggtcctccttacagatctctggacatatagacattcaagttatatttaatttttcacattttcttgagaatcttttttaaaataaaattatgtgtgggtactacattacaatcattcccagcctttcttgttgccttttccctctcattttttctttaaaaactgcttatacacacacgtacacacacacacacacacacacacacacacacacacacacacacacacacactctgtataacatgcttagatgatttaaggttgctcatacgtatatgtttttagtgcagataactggtattagataaccaattaggagcctagatttgaagaaaactgagtctcagcagtcaataatttcctgtaggtcttcatctagggtttatccttatgatatttatctagtccacattggaatatcaacctggtattgccaatttttagttagtctttatgtagccatagggttaagagtctgtgagtgcagcttccatattatatgcagatctcacaggttatgttgtggttttctggctcttgcaatatttctacctgttcttctttggttttccccttagtcttagatcctggatttcttcttcttcattaaggtgttttgtgaaagtattttatgacagcaacatgaaggaaacttgctattatgaatgtcttctaaattatgtttactgtactaatgcgctgagatagtagaaaagttgatgtttgtttacctttataggagatgaagctataatacagacagtcagctattttggtagcttcattattagctcccagttcttaaaaactgtcaatctacctaaaattaatatttcttttaccattctattctttttctaattttagaagtataacaacatagatcacaaatcttcacagaactgaatatttgatgagaatgcattgcagataaatgaaaataaaaaatatctcttctggtgaaatgtgtattgaccaacctaaggtttttccagtggtcattgttgcttggggtgcatgttgttctcagagacttgatctctcatccagagctttgatcttcttggttgagtagtatgtttttatgcattatgtcctcattacagaaaacactcttgcacatcagaaaagcagcccagtgacaagtccgcctttcttttggtgattgttccatatggctgggactgaaaagactcaaatgtgttcctcattgcatgcacatttcacagtaaaactgccactagctgacattctgattttaaagatattagatttttatgtgtcctaatttttatctaatgttcacactgaaatgttcttgtgtttatataatttactgtgtctagttaagcaaaagagagctgtattggccacatcagaagggctggtcctacctatcttgaccatcatagtagaggtttatttaaagctttgtttccttttgtgttgcctatggctgtaaaaaggcatgaacattaatcatgacattgactaatggctttgcctgcttcatgatgtggagtagccatcatgactgtatcatttgatagaacttttatctggactggttgccttaataattgaaagaaaaactttgtcttagcatgatatgtgcaaattaaaacagattacaaaactctcccttttaggaagctgataagttccttgttcaatagttacaaaatagaagaagaaagataaggaggaggaggaggaggaggaggaggaggaggagaagacgaagaagaagaagaagaagaagaagaagaagaagaagaagaagaagaagaagaagaagaagaagaagaagaaataacaacagtgattgacatattgtagaacacctgaatttattcctccctgatttctctctggcacagaataaaggttctggtgtctataggggttaacaagttgtttgaaagacattaaaagatttatcaacaaattaagcagttctctgtatatagtggtaaatgataaatgacaactgaggtatatgttcaaattaaagtatttaaaaaggagttaggcctggagctatggcctagcagttaagggcacttattcttgtagaggttctctaagttcagctcccagaactcagattggacaactcacaactgcctgtaacaatagttctaaatgatccaacaccttttcctggtcttagtggatagttagaaatcatgagccaactctaggaagtcttccagagtggtttcataggttttcttttgtgtttcaggtaacaacacttgtcaatacaagcaacaaaggtccatcaggtaaaaagaaaggaaggtcaaagaaagcccatgtgctggctgcatccgtagaacaagctactcagaacttcctggaaaagggtgaacagattgctaaggagagtcaagacctcaaagaagagttggtggcagctgtggaggatgtacggaagcaaggtaggtgaaatagcatgatgctgatgctgagggttgctgcatgaatgagataatattctttagactcaaaggaattgtttaccttgtttgctctctgcacatgatgtttgcaatatttgcatacttattttgatgttaaagtgtgggcatggcttcaaaccccatgcttttgccgttacttaaaaatcttcctattgcttgcccttggtgaatgaaaacaaattctcctatctaactcatatcttggtatgaagttggaagatacggtctttgtaaaatggcccaaaacccagtattttaaggaggatggaaagcaggatgcaaaaccaggtagaaaaaaatgttccatgtgattctctaataatctttttagtccacagcttttctcacacatctatatagttaacatagagtttatttggcatttgaacattttttcattagaaataaaatacaagtaacataaaattaacatcaaattgtttttaaggttcatgtacagtttagtgttggtaagcctaggcacatctttgagaaacttattactagacctttttcatcttagaaaagtaaaactgtatgcattcattcaactattcatatgctcttatcaaagtctctgtgacacactcttcatctatttgacaactgttgatatttcatagaagtgggatcctgtggtatgtctttttctgactggattatttcattaagtacaatgtcttcaaaaaccatacactctgtggcatatatcattattttagctttttattactaagcagtattccatcannnnnnnnnnnnnnnnnnnnnnnnnnnnnnnnnnnnnnnnnnnnnnnnnnnnnnnnnnnnnnnnnnnnnnnnnnnnnnnnnnnnnnnnnnnnnnnnnnnnnnactattttgctcttgtgaacaaaattattattttattatacttaaataagtaagcacatatatgatggttaggtttaattgtcattttgaaacaacttaaaatcacccagacaaagagacttaagagattgcatatatttgatgctctgtaggggatcaccttaactaaattaatgggtgtggacaggccaagccttctgggggcaacaacattccctaggcagggcatcctgaactataccaaaaatagaaatgacattctatcttaccataatgtcaattaatagttcagaagcatatgccgaaatatttgttgaacactgatgtgtaatatctaaaggaatgtttcattaaatacttaatgaatgaatggtccatttatattctttgtgctatcttactgtcttttgcagttaatggatggatgtttagcatcttaaattaaaaccctttcacacaaacacaaattttctccatttcttgtgaatatggcatacagatgtgtgtacacattctttgccgctgtgtgggcacacgtgcacttcatacctatgttttgggggcacaaatttgatgtgggaatcatcctgtattgatttttccaatttcccaatgagacaggatctctcaatgaaacttggcctgtgttgatataaccagcctttcttatcagcttactctgtggaacccttgtctccaaattctaaggctgtaattacagacaggctaccacactcatccaaaatttacctgggtttctggagattataattctagtcctcacaattttgtggtaagagctataaccgctacagtgtcttccaagttcctgaccaatgccaccattctattgccttcctcctaaaagttaacttcatgtttatgacactgacccaaattgttacttctactggacatatgtattgttccatatttcaccttatgtgaagagagcatgagtgtatatgtgtcccgaaagtatgaatgcctccatgtctaaaaccacactaggaagctggtgtttttctggaagtatggtcagacacccgcttgccttcatgcatctgtgctctagataattactatttgctgttgatttcttatgtatactaatgtgcacaagtaaaaaatgcaaggtgtgctcagtttgacaactgtttgcaactgtgaagtactcagtgttctcaaggttctacacatatttacagtgaagagttttggtctctctacctccttaagcatctgtcttttttactaataaattttcctgtttagtttccatagcaatgccttaggtttctctctctctctctctctctctctctctngtttctctctctctctctctctctctctctctctctctctctctctctctctctctttctctctctctctttgttagttgcagtatttggatcttgatgcttggttgtcatgaggttcatatgaaattgtctattgtaactccaatagaataatcaattggctagatttccttggtggtatgagaatataagattcttatttaggactgcttacagtggttgctcttctgagaatagctgattactttgttacagaattgattcttatggataacatatctgaagaaaccctgagcccatattttccttttcctgaacagtgtcatattcaaacacactttactgtaacatgctaagtaacaaccaaagtattaaaaagcttgcttaaaactcccctttgcttttgtgtacttgcttcccatctgtcagagtgtgcctctttccaggcaatgtagtccattactgtgcctgcagattttcttgcttcctttctccctttccccaatgacagttcagctctttcttcactgtgtgatttcctttgcccatctggcttctgtcagttttcatattggctctttattccatctttttgcacaatgtatagcctgagctgattttcagagtgataaaaatgaatgaacccatgagaaaaaggtgtggatgaggttgggaatatttagttatttgacatctaaaatacagcagcatacctcccattgtagaaatatatatgtctttaataacatagaagataaaatttatgtgaccatttacatttggaggtaatagtttcttttttcaattttttcttcaatgtccatgtatgtatactattttattttctctggcattgagattgattctaaggtttttcccaaactagacaagtgatttacctctgactttcagttctcagtcttgattttgtgttctcagataaaatcttcaaagcattttcaccttttttttccagaatgaagagaagagctttacatggccatttttagatttctggtattgagtcatttaattttgttcatttatagcttctgggtgtttgtggttttaattatttaatctaataaatttatatgcaaaattatgcatttaaagtatttactgcctcttaacatggttaaatttactgttgtctcaatttatttattacctcttcaaaaattattatcttctcaaatctaggatgcatgcctgatgttcaaaagtatccataatgcatgctaactatcatttaaccatagggtattctgcaagaaaagcgtactttcaaattacaatctgtagcgtgttctttgaaaaaggctatgatagtgtatacatgaggaacatgtatcaaaaatgcattttcaaaattcatattatattcctgtattcaaaacctggaattctgctgacttatgcttggatgaagataacatttccaagtgtgtgtgtgtgtgcgtgcgtgcgtgcatgtgtcaactatctgacttttatcttaaataaaatacttgagttaagtgtatcagctaggtttgaatttcatcagcctaaagacagtgattattactacactgtcttatctagataggagcttgatactttaacacacagtgagtgatggcaaggacagaggctgtcttggttaccattcaagtgttgtgacaaaacacataacaagtttcctataaaagaaagtatttaatttggggtccatggtgcagagggttagtccatgaccatcattggtggcaagcatgcgatcaatcaggaaggcttggtagctcaaagatgagtagatgagtagctcaaagttcacaatagacctagaagcacaactccgagagggacactgcgattggcatcagcttttgaatcctcaaaattcaccccagtgacatagcatctccaataacatcatactttctgattgtttttaaacaggtccaccagctagtgcattcaaatatgtgagccttcagcggccattctaattcaaacatacacagaggctttcctgggaaaccagtagatatgtagaggtgtggttaagatttcaaattttaatattactttggcaaaatacctaaatgttacagactaaaccacttaagtatgtttagaatctggattctccagttttcagatgcagagagagaccatgcttacattaggtggttgttttcactcaaagaagtcaaaggaattttaaaacttaggtgtctattggaggaaatgattcagcacatataaggtcttgccaccaggcctgggacccacatggtagatggagctccatgaccacagcttaataccctggtgtatgcttgcagatacacacttaaatgccacagtagatttataagttatattttgttgacttcacctgtatctttgggaattgctctcttactcgattttctttttggtgagccaatgaattcagttgtggttccttactggagaatgagtgagagcttatttgcagaagcataggcaacttaccaatggccacaccactaaataaaatgacttttcctctcccagtaaccactggcagctggtagacctcatttcctgtctaataactaacaagcctgaatcctctcaggcagactggtagcatccagtggtctttctgaagactggttgtgtcttcatgactcagagatggtgggagttgtgtgtagaccccgcatgctacaagagaatagatgtatatatgaagcacacatagcaaaacttttcaaaatcagagaaccaagacactgttataaaaatacctctacattgatgtgcccagaaagcttaaaactgatggagtgtttaccaccaagaccttttgaactgaaagtacatgtccaactcctgttagtatcagaatcatctggaaggattttaaaagcctgacatctatttcctgctatgattcctggagtatgacctgagcatggtgtttcaatctccaaactggatggctctgtagaaattatttctgaacaaatagactaagtttctgattctgcattatgtgcacatagatgctcgatggatcctgttagctggagatgcaggtgactgatgctaagtgtatgtgtttctcaacagtgcctgttttgtcttaaatatttcaataagtactcatcattttctcaagaaacgtttaaatatcaataatattttgccaagcttccaactttgtagtttatttagatataggtaaataaaccttatatgggaaaatcaacctgatactttacaataaatttaatggataggtaatgtcttatgatggaggccttcccaatcatgatgtactacagtctcttagaaaatatgtaataaggtatttagcaatcctgtctatgaggcagttaaatattaaaggagtttcaaagaaaagaatggtatactgctgatctcatttgatgagcagttttggatgcaggtgcaatttcagctatgctgagatggtggggagggtcaagactgaggaactttggcaactaagattattatacacaacataattgaaggaagagagagaggaagacagaagctgataagtagctgcttgttacctccataggggtatgctgaaagattaacctgccaagtgtggtggtttgaataagaatgacccacttaggctcatataccccctgaatgcttggggagtatctttaggtgatatggccttagtggagtaggtgtggccttattgagggaactgtgtcactgggagggagtaagctttgaggtttcataaactcaagccagtcccagtggaactcttcctactgcctatcattcaatgtggaactctcagctgcctctacagtgtcatgtctgcctgtgtgctgccatgcttcccttcaagattgactaaacctctgaactgtaagccagccctaatcaaatgttttcctttataatatttgccatgatcatggtgtatcttcatagcaatagaactttggccaataaaaagtttataaaaagttaagtgaatcagcatacacctggcgcagacatatgatttttgtgtagttaccacaggaaatgaagctaaacaaaagcacagtgctttcaggatccacgactgtggtggaagccacgggaagagaaacaaaaattgaatgttacaagcatttcagaaaggagtcaatacattcccatttattgaaaggaaatgagagtgaacatttgctcttgtgtggccacaggcaacatgattgggaagacttaaaggacagcaggaccagagttgaaaccagtttcatttaagacattgataaatgaggagctctccctagcagatggtgatgctgtagggatgggccactggtaaaacaaggagatttgcaagtatctgaagttgatgaatgaatatctcagagatgtaacattcctttgagtaagtgtactagataatgaagagggaagggatgactgtgcaatttgggaagaaagtccacatttggaattgagaattggatataaataaattagaacaggaagctgctatgaaatgtgaagataaacaatatagtcataaaatctgaagaaataggacttttaataaaggagctagtgatctatctgtacccctaggatgctgtcagcatgtcgaatttttcagatatgacagaccatgaacacttttgattttgcaagaaacgtgacatctattacatttaaaattgaattttcagaaaatggcaaaaacagtagtcaaaaagaaggcatgtggaggatatagaatatgatgcaggggagggagcctagccaaataaattagctgtaaccataaggaaccctgaaaacctgtaaaggaaggtactattgaccttaggtgcctgcatgtacatgcatgcaaatgcacatacatacacacatgtccacaccattcacaaatgaagtgccagagcagggagggagaagagaaggcctggggatagatgctcaaaagttagagtagatggtgtaataattgagctaggtaaaaaagataagtagacttgcctgtattgctcttgaactatttctatacttatttttgcccctgtagagagtttgggacagagctgattgactgtgtgctattttgtatcttttggggagaggaacacaatgcctttcacacaatggcatttaatagattcattgattgattaccaagggatggcaggaaagcaatagaagaataatggagaaacattaagagaaaacgttgagtataattgtttccttgtttatatcttatagcctaaatcaaagagagaggaaagccataactgcaaacataaagggaaagaactcaactggtagcaacataaagatgtcttcacagaaaaatcaaataaaaaggagagaccaagtctagagaggctgtgcagtagtcgagaggcaacttagtagatatccacagcacaaataaagctggacccagatggactgttctgtaatctcagagctcctgtgacaagatggtgagaagagacaggagaatccatggaagctcacagcctgctaggctgtgtaagtagtggtaaatatcaaaagagagaccctgtgtaaaataaggtagatggaaaagacccatacctgaggattgtctttgacttccacacataagcacacatcattgtgaactcatatgcaaatgtacacacagcacacatatacacaagtcttttatagaatagatgagttgtattcaccaggttaattatctaattctttttgaacaatgagagaagtggctttaataagctatggatacttgtttggagaggtttaatagatatgtttgttgttggcaaacaacaaactctcccatctgatttcatttcttagtttgctaaaaagaactgctttggacattgctcctttggacattgtagaaaatatcaatttataagaggtttaatcatcattgtctgagaacctattttctttgatatgtaacagcatttctagaactttcttacatttgaagcagactcaaaaactgtgctttgaatattaaaagtcatggttcttataattcttttcaatgtcaaattcaattggtggttcaacacagtctggttctatgcctcagcatttagaaaagtgtaaagaaccccccttggccttctattattacatctccacttcctctgaagccagggagtagtgtcctggatttctttccctcaattcacacctctgcattcttattaaccactctctgtttgggcaattacaaatcaaaagcattaagaaatttccctgacatcaatagaatatatatcaagacatatgtggctgggcccctgcattaatggtaaagtcttggttcaaaatgatagaggtgcaggtgaaaaaagtggtgtattctttcatggagccaatttgtaaaacaaggtgatggcacagcatttaattagtcttgccaaaacccgtggcttttctctagtttgacctaaactactaggtgaactgatagattgatgtcaaatagctgttttatttttacccattgaatacctatttaataactattatccagtgggtgaaatcacaggaagcaaaacagaggaagggagaaagaagcccttcataacctccagaagatatacaattgcctactcgtcacctgatgactgtctcacttcttgtttgataaaatcacccacgtggaaagagatggtggctgcaatttcttcatgggtgtctgatgaggctgtctcagaaatggtatattgccaagatgctgttcttctttcatgtgtcctttttctcttgtgtgttgagcttcaacttttcatactccggatgctggtgtgtgcttgctgacatgattgagtacccttgtaggtatagtgcatcttcatatgtctagagtgtgctcctcttgaagtggtgtgagattccctccttttctggatgggagtgcagattccattccacaaagttcatatctttgaacttagatttgctgcatgtaaatcagttattctgaataaaattagcttactcaaatagcatacaatgttttgagaaatctttgtgaaattggttatgaaatgctcagaaatgttcaagcctcttacatgaatagcacacacagtgctttacatacaacttgtgcatgtccctcttcaatgttcagatactttttatagcagtttggtgcccaatccaatgtaagccactgttaggctgtgttatttggggagaataatgatgataaagtagactatgcatgttcaatagaagtacaactaatctcaaatgattttcagtgttaaatctgcatattctaaagctttaaatatggagtatcaactttaatataggaaaatagccatgcataggagcctagggcagacattgaagctgagatggcatgtggctccttcttcaggttagacattgaacagagctgggatcttcagatgcaccactatagccatgcaaacctgaagctgcctctctgattacagactccttcccttgctcatagagtcatcttgttacagctgtttctctgtataaagttcacagacagagtgtttcagaataattgggatatgacagaaatgtgtataaaaactgagtctagagcttcaccatacttgggtttagaatgcatagacttccttatttctgggtggtgtctcaagtggattctaaggctccgccttttgacattaacaattgccagagcttaatgcatatctatgactgctaccttttgttcaagataatttaaaaattcacttatttttgttgtttagaattccatacatgaatatagtgtgttttgttcaaataccaccattaactaatatagatctttgtgtgtgtgtgtgtgtgtgtgtgtgtgtgtgtgtgtgtgtgtgtgtgtgtatctatgtcttgtatgtttgcaagtgtggatgttcatgtgtagggttgcacatatgtgcaggtacacacacacacacacacacacacacacacacacacacacacacacacacacgtgtgtgtgtgtgtgtgtgtttacaggccagaggtcaacctcaggtgttattccttagggtctgtccacctttatctttgcgaaaagttctctatttcctaggagctttctgatttggatagcctggatggcccggaaaccatttgcctgtcttggtttacccaccacagtgattttatgtgtgtaccaccactctcggttttttgtccttcactggggatgctggggtagaactcaggtccttatactacttgcatggcaaacactttccaagcccagtgtagcttttatttccttttaaagtgatgtaatcagggatggaggtaaagtgggagtttgagagtctagtgaaagtttcaaatgaatagaactgtgagctttagtctccagaacagtaaacaaagcaaagcaaagcaaaaataagtcaaaacctcagaaagaaaacaaatatcagcaacccaggctgctaccagatagggaaatcacttttcagaagcttttaacctcagaatttccaaaagaaacccgagtatgagtgcaatgttggacagataagaggaggatggatgtgaaagtatcatgaaagaaccatccctgtggaaatgccacatgtctttgaattcaccttaatgcaaatattaacattttctaggattttaactgctgcgtattttattaaataaaacactttgtatgtcacctttgacttagttcaggacccagatgtgttccaggtccacagagttcccttgttgtaagagagtttgagaaaactgtgattattctttcacttcttcctctttctgggacccttggcttttggaaaggctgcaatctttggctacaagccaaaaaagatgacaacattgactccttcttatttactgatgctccatttgtcagctgctgaatctgttttctcaacatcattttgctagccatcaggaggattacttgccatatttttttagtcagccactaaatatctatcagttattctgatagataacccgtgtataattgcccaaagcgtgtctaagtgttggattgttataagcactatcctgtgtgctgagaataaaaacacaacaacaacaaaaaaccaaacattctttgcctgtagcaattttgcactcagagttgagacatacaaattaataagaaaaattgtgtaggttagtgatttccaagtgtataattatggtttgagaaaaaaaaaaacttaagtggggcttactattaaaataaaaattaaaggagaagacaagatggctcagcagggactcttttaatggtggaaggagagagccaattgcacaaaactgcccacatactaagggcacttacacccccaagctcccattcgtacatcatgtacacacacaattataatatttttaaaaaggaaaaatctgtgctacatgatagaaaataaatttaatatataattaataaaagacacactctaagaggaaatatttgtattctacttctctggtgaaaggctttcacttgtaatacacaaagtactcttaaaatttaacaatgataaaaaacaacctaattcaaaaggtaattgaacaatttgaatagaaaccccattagagcagatgtgcagacaggaaataagcatagagaataacacttccattcttgtgactgaggaaagtgatgcaaacagtgagattttactttacaccttaagatctctgaaatgcgttgacacacatatggcagagccatggagtgaaagctaattcactccggtggtagtgagatgacataaccatgttttctttaatgtttactggcaggtttatgaaaaaaagaacatgatcatgaaagtggtacagccctggatattaacttcttgagttctaaatacttctgtacatgacagtacctatacatgtcccattttttctacaaaaatttttagaataattttacaattacagactttgcaaggacagtactaaaagttcctatatacttcacacccattttctgtattagtaatacctggcacccttgtggtttgtttgtcacaatttatgaatcagtatcagtgcctcaatacttgaactgagtgcagcaagaagagggagcacggtaacaaactttgggttgagatgcacaacacaagtggcaagaataaagcaaatactgatgagtttttattctgcagctgacttatttgagtgatgcatgatgaaaagtgatgaattagagatctgtatggatacaacacagagatctcatttagactaaccccggtagaggcctatttattctaagcctctttattcagataaaaaatgtcagtatgttatattgacatacacacaaaaaagtaaacatagaagtaagaacaaagtaagaacaaaaaatgatggaagtctgtggacagcagtagagaaaatcatggtccaagactgggttgtaccaggaaagtgcttgaggatcacacagatggtggaagacagttgttttctgcagagccatatatcctcagagtgtagcaacggaatgggcagctttgctgtgggcacattttcaagttccaggtctttcaatttccagtgtgcccaagctgtgtgatttggggatctggcttctctgagttagggttttcaggagctcattggcatgcccagtcttacatacaccctaatacactaggtgaagagtagcagaatggatcttagaatactgcagtgtggagacatccagtggcggggtccttacctgaaaatttaattctggccgctgctctttctgcaggattgcttgtaaagcttgttcatgataaaatacttcagtatctcaggtagaacactcactcaatttattttcatttgaatctcttcttttaaatgtaggttgttgtttgttttgtttctgtagtgctaggaattgaacctggagcctgatgaatgctaggcaaacactcccacagacttctttctcccaaacacttttactccatctgcaattccccttatttgaaggaacgtctttaagttgaccatctgatcccaggatacataaaagaaagcaacctgcattagcacaaaaagaaatttggtcatcaagggctttctgagtaagctcagcctgtaattcaatcaaacaatgcatttgccagagcattgtgactaacggggatgcggtttccaagataaagccggctcactcatgcttccctaattatgatctatgccagtgacttgatataagccagactgtcttcattagctcccccctctgaaagggagacttcagtgagcatgcttctaaattagactgcttttagtaagaaaataaatgacacagggaaaaacatactcctcaatccattctgtgttctgctaagtgcttgttaatgcaaagtccccaaggacccccagtgtggatagacatagagtcaatacaataatttatggagaagccaccccagctttgcagggctggggaggagtctctgtcttcagaagctgatcctgggcttccagataaaatagataagaaatgggtaggatggagttggaagggaagctcacctccttttgatggtcctggcaatatatgcttattttcctgttccctcagttaaacagaataaaagaatgttgtatctcccagttgacagacctcatagagggacttttggcattttcctataccgtgctttcgagaactctatttagatgataaccttagtctcaaatttccagtgctttcattgctactggagcagtgcagaaagcacacagttatgttgtatgtgaaggcatatggaaacccttgcctaactcatgtactggtattataggcatgcagtgcctctactggcttctatacatgggcactccaggtctaattcagttatgcatgcttagttagcaagtgttttactgactgagctaccttcaaagctccttcactgcctttgaagaatatttattgtatttttaatttgagtatgtttgtgtgactctgtgcagatgttaatatgggttcaggtacctgtggaagccagaaaagggcatcatatcttctggaatggagttacaggggattgtgaaccatttgaactgggtgctggaaatggaattcagctcctgtgcaggatcaggaagaattcttttttattattacttttattttgcattctaaccacagttttccctaccacatgtccttctgccccccttcacctcctccaacccctcctcacctctcccacagcccacccccagtctactgctcctcacctaagggctcccatgaggagtcagcatagtctggcacaatcggttggggcaggggcatgctcctcttccatgcatcaaggctgagcatggcatcccaacatagggagtaggctccaactagctagctcatgtaccagtttctatcatagtcctactgctagggagccctcatctagtcaaagcttgacaaccatctcccacatacagatggcctagttcaatcccttggagtgtccacagatgtaagtctagattcatgagtttccatgagcttggttcagctgtctctgtagatttctccatcatagtcttgacctcccttgttcgtctattccttcttccttcttccttctcttcaactggattgtgaacacatgatttttgacaaagaaaaaaatagcacaatggaaaaaggaaaacatctttaacaaatggtgctgacataactggatgtcaacatgcagaacattacaaatattttcatatctattgccatgcacaaaactcaaatccaggtggatcaaggacctcaacataaatccaggtacattgaacctgatagaaggtgggaagtagcgtgacatgcattggaacaggagaccacttcctaaatataataccaatagatagaatctgagagcaacaatcaataaatgggacctcctgaaactgaaaagcttctgtaaggcaaaggacactatcagtaagacaaaatgacatcccacagaaggggaaaatgtcttcaccaactccacatctgacagaaggctggtctccaatatatatccagttgcagagaaggaggagtgatgagcaaaggggtcaaaacctggctggtgaaacccacagaaacagctgacctgaacaagggagagctcatggtccccagactaatagctgggaaactagtatgggactgatccagacacccatgaccatgggtgtcagtgaagaggcctcggaaatctatagggcctcttgtagtaatcagtacttatcccaagcataggaaaggactttggaagcccattccacatagagtttcctcagcctagacacatgggggagggcctaggccctatcctaacggatatgaaggattattaagaacccccatggaaggccacacactccctggggagcagaaatggtatgggataagtagggtgttatttgggggtaggggagggagagagaactggggttgacatgtaaaacaatcttgtttctaatttaaataaaaaatgggacaaaaagaactcaagaaagtagatatcaaaatacaaaataacccaattaaaatacagggtacagatctaaacagagaattctcaccagaagaatctcaaatggccaaaagacatttaaggaagtgctcagcatccttagtcatcagggaaatgccaatcaaaaccacacagataccatcttacttctgttagaatggctaagaccagaaatactaagggcagcttatgttggagaggctgtggagttaggggaacattactccattgatggtggaagtgcaaatttatacagccattttggaaatcaatatgaaaattgggaatcaatccttaagacgcagagataccaaaagatgctcaagtataccaaaaggacacttgctcaacgatgttcatgcccatctttttaaagcctaaaaaaacagtaatattgctatttaaaaaaaacaaagcatgttctgaattagattgtgctgctgtttgttgctctgtgtgccgattctattgtagagctccattatggattcttagaggagtatttatgggatgaaaggccagaagtattaaatatttacatccattagaatgtgatcttttggtataggcagaagggagaagaattacttggtttatttccattcacaggctttatgaacttactgcttgggtaatttcttaaatgtcacaattaaaaatattgacctatttctctatgggctttcattgaaatggtagcagtcatctctaatgttacctaataaatttaaaagatggtctttaaattgaaacatatcatcactagaatttccccttttcaatcccagggctctaaatagccaggaatgctcttcttcatagattaacatcctgagagctacaacatgaacatgatgtctttgtcttcttcagtagagatagacagagcagagcatgcactgtgttgtgcttttctgaaacagcatccttttacctctgcttttaaattctcatctaagaaatattttaattgttctctaatatgtctttaaatttttctctggtgtgtgtgtgtatgtgtgtgtgtgtgtgtgtgtgtgtgtgtgtgtgtgtgtttcaagacgaagagggcaagtgggttgcccatataaatacaaaggccagaatacattctcagttgtcatccctcagaagatatctatcttccttcttttagacaggtcgtctcactgacctgaaactcattgaacaagctgagctggctattcagagagtcctagaaatttgcttgtgtctaccacatcagtgctttgatatttgtggttttgtgcagagtctagaattaaactctgatccttgtgtgtgcaaggcaaaaattgtcctgactgagccatcttttcagttcaccatttttactcttaaaaatctgcaatccagttgatcaatgtcctatataagtgtttgttcatatagtggtagaaggtagagttgtcatattaatattgtgtaaatcacgtggtcatccagggtgtatctccatggaatcagaaggatgaaagttagcaattggctggggcaaggcttttgtagcccttatagaggggttgcccatggttcagaaccaccacacttgcccctgcttcctcagcaagtgagtcaaaagagtataatgagcctttgtaggacatgagtccccaaaagataaccaagatgtgagggacccttagctaccatgagaagccagtagatgggtcagaatgtctcagtgagtccagttttagcatgggggagactgggtttaattacttaaattgtctaatcttcatccagagacatattctgtaaggatatacactgcagccacatttctggtgattctcagctaggacagaagctctagaccagtcattccagggacactggatgctttcttaatgtaatatggtaggaaagccattcattctgatgttagaagtggctggctacaggaaactatgtataacctatctctctagtttgatgggtttatctgtggattatgtaaaatgggtagtacaatagtccctgtattccaaaacaggaggaacccatccaacatgacctttgatggagaggattttgccagggctatggatttggagaagtccttcactgctgttagacatactgattgacagaagactaaatcttaagacagggtctctttgtggctcctcattttacaatattagagacaccatctattagttgttgacatatactttgagtctcaggagagaattcagcaaggttatgtggtccataataggaagtcctgttatctgaatcaactacaaacattttgtgtcatgagaagccctggtatcccaatcgattacaaatattttgtgacaaaaagaatcttagaattgactggtagccagattcatgtgattttcatctggtaggaggtcaggggcaggaatgtcatcctcttccacatgggatcaacagatgccagaaccattctcagagtgagatttgcaactttcatgactatgcagaaagtatctgctgatctattaaaagcccaacacaaggggatcctccaaagaataattttatctattgtggagtaacagaatattgtaatgggaatatgagagccctaataaaatgtgggtgtagtcaaagtgattaaggtgaggagatgctccaaaagacaaaaatgactacggctggtatttaaatcacaagattggcatcaatgaagtttattggactagtgctaggctttgatttgcttagtttgttggtttatttggatatgttttattttgattttggtatagttagtgttgatagtgaatccttttctaattctgataatgtacacatttctttcacaatccaaaatgtcatctgcatgtctgtaggagacatctatgctgcaacacttacagattgacgttttctgctttcagtgtgcttaatgaaaagaaacagtcttctgcccttacccttctatcatttatatacttttcagatcattcactggtttccaaatctagacatgtacatgtcaagctgccccacagacactgtccaatgcttagtatccaggattattggtgacccagaatgccagctgtattacaccccagctgggatctcaaaggtgtctgtttggcttgacctccagtaaatagtgaatgtgtaaaagcaaaagttcttctgcagaaaattctggttatcatcaaatgggcataaatagaagtttcagattgctgttttcagtctctgcccctgtctctgggtgatgcatacctggggtaactatctctaaaagtgatggaaatgaaaagataagagcaactcagtctgtgaccctgcctccttgatagtctctcactataagttctgacctttcctcaagacctaaacaattcctgatgtttcccatcttatcttagttctctaaatacagtaacactaaaagaaatattttgttgttatctagtttttaaaatgagttgcttcacctacaaaataaaattttaaaaagcagagttaagacaatttgttcagccctgtggatgaatagtttttaattatcaatcagaacacagtttggcccctgaaaagttttcattctcattgtaaactaaagatactggggaaaacactggaacagctgtcagtcaacacaagggtatcttcaaaacaggagcagttccctctggaaaagctttctcaactttttatattaacattgagaacacactatcatgttatttactagtctcagtctgatgacagtatgtggataacacatgatttttattagttttctttgcaattctgagagaaatacccttttttatgaaacaagttgtggattaaagatgaaaatttatcaagcatgggccttaaagataacgatgaaaagttataaagcacagcttgaagggcaatgtgctcacttctttcatttttccagcaggatgtagttaaaattggcattttccacattcgtcgtctaggtttgtaatgccgagattgaaataaatgtcatcaccagagcactagaaaaccctcctctcttttgttctatcatgtggggctgtcacaaaaaattacatactctgaaattagcaggtattttttaaagtttagtaatgattctcaatattcattgttcaaatggcaagtactaatagcattttatgttgccttctctaaatttgaaatgagtgtctcctatctgaagaatagcaacatacattacaggtgtcttcagggataaggataaacattttatgattagataataattaattagatgtatcagaactcatatgtttgtgtcccagttattttgggttcttatgtctttcttttatatgcagatgtttagaggttacccagctgtttttcacattttggtgattaacagtaaacattataattcggtcccttccagttttctacttgctatttatcaagtctttatgtagtatttcagactttaaagaatcactgatttgcatttctctctgtaaagatgaagttataagctccacctggctttccaggtataaaatgagatcgatgtggtcatatatctttcctattttgctgaataattcatctttatgttcttcttgcacagaccctgatatttttctttcatgaggcagcaattggtttggatttactgcatactttcattccagcccctttctctgcagcttttcttctattgccttttccatccagaaaaataacactttgggtgcttatgagttgtgtgaccattttttttttaccctaactatcaatattgtcatttcatatcccatctctctctcttttatctcagagggcattggaagagaaaaggtaggttagacataaaaaacattacttttattttcatatccttttctaaaatctctaggtagtaagattattcttatctctgcattagtcatcttcacacttaatgccatctaactattccatctatcagctttgtaagaaactcacagccatagtcatatgaattttatcagaaaatgaattggaaggtggtcctgtgtgctaaagttctgaattgaaagaatctgcctcttataaatgtctgaggccatggtggtatatagcaggtgacaacttgtgctcagatgtcaacccaccagaggaatgattttctgatggaggaaaatcctgttcaggaaaggcttgcaggaccaccaactctgtaaagtgtagctcctgtctgtaatttcaaatgtgcaaaagcagctatggtgtctctccaattcctgcactttagtgtgtaatctcataagatatggatatgcaatctcatgacttcatctcagtcttatgggcacatatatctgtggataggcaggaggatgacttctcattaattgtataagtttggtaaacagaacatatattaggatatgcttcataactaaatttattgttccacaaggacgacaagacatttaaaagcctggattgttccttttattcagaaaacaataatttctccctagtctaagacaaactacacacagttaactcattttcaccttagagcaagttgaaactagacttaatgtttctgtaaatggatcataagttaagaactttacagatatgcacaagggcaaagtcacagatgtctaatcaaggttattaacacaaagaatcctaaaatactatgccaatttctttaactaaacttggctgataacacaggccaatgcccacttcctactaaatttcatggtaatttgcactttacacgaatttctaatctcagtttatgatattaaactcaaggttcaactaactaactgtttattgtttgggtcccagataacaattaatcaattaaccaagtccaaagaaaattaatctgtgtccagctactgtgggtcatttcacattagccagggcttcaaaggatggtctgtccttacaaccaaagttacaagatatccccacttttatgttgtggggctacaaacaagataagaggatgttgggtttggacgtgttcaatgccactgtccaggaaggtgccaagcagcatgttcctgcctgtgtgttaccatggtaaatggctctattccttattgcttcctcaggaatgtactttgaccatgagatgcaactctttttttccattcatttatttagctcataaataaagtcatgcacaattatgatacacaatatagtatgttcacaatggcatggctaaattaaaccaattaacatgttatatcacacatattcatcatatttgttttgagaacacttaaagtatactatctcacaacttttaaaatatagcatattgttatcaaccatatttatcatgctctcagtagacctcaagacttcagagagtccatgcctcttgtccaactgcagttttatatccttaaaccaatcatttcccaattgttaaaagacccacattgaagcctaactcttatagtctttttttcttattgcctcaaaccatctgtaaaaaatgtatttaagctaggtgaacaaagaagcaagggagaaattgaaagagagaattggaactaaagataattagagacaatcatagcacaggaattatagctgcagaaaaataaagaaaatgaccctggaatcatatatgtaagtctttatccctcagctaaaaaactgtcaagttcagttttgctacgctgtggaccttcaaaacctattctctttggctacaataaagaaattgttcactagatttcacagctcattcaagaaaaatggggccacactgtaacaatccactcttggtattatttaatctgagtaccaaatccatgtgacccatgctgtaaaagtctgggtcagctctgtggtacatgcaactttttaggaattgggctaaatgaacaagtcactctttgcctccactctcttggtgaggactgggaaaagtggctcaaggacaaatggacccatgacctctctgaagagacacatttgtatgggaagcttgtgtcttatgctgtcttagaggaagaggagtaggaagggaccttgtgactttctgcactaattcacacattactgcatggaaaggaaaacttggggattattttttaaaggaaacaattaatggaacaacttagggcccatttaaggtagcaatatctggaaattacctttgatttagtaatcaagagttaattttaaaggatattatctcccaaatttaaagataatgcagtagttttattttacttataaatcaacagtatttttattattttaaaacctttaagctacatccaaaatattagtaatcaactatcattcaaccaataaattatgtatttatattagcagtaggagggtacagaggtttctaatacatataagtacataggtcatactctagtaaggtgaagaatagggaaaaatggtgttggaaaactatgtccaatgaagggatacacaaaagatgaaactcttaatgaagcatctggagaaaaataatttataataaaaatgcatagtaagaactaaaaaatttacagtgtatggcaagctctaccatcaaaacatttttgttttccttctccattgatatatgatccattctccagccttctctgccattgggtaagcccctggacataaaatttggcatattacaacttcttacttccctgtggaatgatgtagataacttgtggaaacctaaaatggcaaaagacatgaagtcagttgctgccttgtctctttaccttcacatttgtccctctttacattctgacaagaagaaataaactattttgctagctgactggggtattgtgctgtatcttgaccttttccccagtgaacattaaaatcacaaaattacatctgtgtgggaagcagatgaagtcttgagtgaatatctattgttgtcatgggcacagtcatgtcaaggagcccattgcctcagaaccatgggagtagcaaagccttccccgggtgagactcacggaaatgctaatgcctttttttgtccaagtatgattgtttatagaggatggaccagtgtgtgcaggcctattggtcacagattcctcctccatgactatagtctgagagtgctcacatacagagacctcctagagagattagataaacctgcctccctattcattagatgtttaaaaattaatatgctgaggttctcgacttgtggcctccatcacagtgagcacacaccaactgatgccagcctttatatacatatgcatgtgtgtatccttttcttgttgcaccagttaggtcagcccttgaaaacttctttaacccttatactaaaatcagaatgtggttccaggaatgtgaactcccattgagttctcagtctaatagggagggagtatatataggcttccatgctagctaccaagctgggaagagatgtggaccaaagcctgagatggggacagggcttgattgcttaatgtgctgtgggaaactatgttttaaagctaatagagataagagctaagttctggtagggatcagaaagcaaattaaagcttgggggtcagagttaacttccttttgttatccctcattaaaaacacccagtatgactttagtttatctttacaaacatctttctgtatactgtagttaagatgaaagaggtagtgttagacccccgaaaactcaagtatccggggtctcaggccaggttcgcggtcaccccaatcaccaggcggattcgagagcttgctgcaaactacacgaggctttaatgtaatttaacgagctaaccccatgttagctcgggtctttcacccacccaccatggcggacagctagaaagacggctcctacgggctcccaaaagatcttatagggcagcgtaaggggagtgtctaggggtacgcacaggcttacacaggctcatgattggtgtgcttccaggcttagagggcttgccctgtgttgattggtcaactggttgttatggctcataggccctcccagggtggttgctatgctctctacgtcattgtcgtgtgcttgtccgtaaagcacacccagggtcgtaaagcatagcgccaccagctaacttctgattggttccttgtcacaagacaggcatctgacytctamktgaccaaggcaggtwtatggcaagcacrtgttcggctrttatggctkccaaaagggaagccggttccttcagtaggatatgtgaaagaaccaattggatgctcatgtgctcatttagagatggtaccccattgtttcccatattagcaccaatgttcctcctgggcagcatgtttctgtcatcaagaaatgaatctgtttcccttccccctgagtctggatatgcaaaaccacctatagacccactcaagggttttaatcaaggtctgaagccaccttttttgttactgttctgctatatgtgaggcatgaagaaccaacccaaaaaattaaagaagtggggattttctaagtcaccccagccagagccaacaccagcataattgctaaccatgagtgaggccatgtgcatctgtttgacacttagaaaggacaggatgtgtctgagtaagttcactgtaacttctcctcttactattttctctgatgctgtttcaagctctgaaatttgtgagcatgtttgttgctaatgatggtagttggttcattagttagttacttacataaatgtggttttgagataaatttggatacttgacacaggatctgtctcaagaatccaaagcttatctaaaactgacattatgaccaaggatggtcttgagtttctaatcttcttgtctttgtattttgagtgccagaactacaggtatataccaccttgtctttttagtactggagattgaacccagtctcaattctaggcaagtactctcacaactgagctccatcctcaccctgttttttttttattttagttcagcaagaattaattgttatacctttttgccattgcagcctagggatggagtaacagaggaatatggctatgcctcaggtaataatacatatttatggagttgtcaaagtctttcttagtgagagaattttaagaaatattatgagaaggtaaggtgacaaacagaaaatcaaatggtaggaccatctgtatatttcaattttgcatatacacaatagagaactagtaaattaatttttcaaaggaagaaaaaaagaaaacccttcactatattaaagctttatctcaagtatataattccgtgtctttctctctaatagatcccatttaataaccaagggggcagattctcaagccttagtggagtgggaattattttttttcttttacttggacatgtgtaacattagaagatgaagttgccttacctgctgggttgcatcaatgacattgcaggtcaagcttatctctaatgaatatttcatagccatccactggtgactatatcttcagtgctcctggacttatctggctcgaaatctgcttgggaaggcacagcagctactacaaatgggcagtgttgagtttccctcatttggagtgcctgatatggtgtgcctgatatggcgtggagggcagttagacagaggtttttatataaaacgtctgaagccctaagatttgttaggttctgatttcaagattctgcactttggttgtagtgtgtctgtagaacatgcagttatgtgtccatttcaaattttcttttttgattacattttcttacttattttgagcatgtgtagtgtgtgtgtgtgtgtgtgtgtgtgtgtgtgtgtgtgwgagagagagagagagagagagagagagagagagagagagagagagagagagagaagtcaaaggacaaatacgtgagtttcaccatgcacatcttaggtattatgctcaggtttattgggcttgttggcaggcacatttacccactgagtcatctcactgatgttgtttgtaatgttttcatagccatgatgtcattgtatagaaatctacttggagtgtttgttacattttggcattaccagcattggagttccataaaaaagataatcttcaactcaaagtgtgaaagtacagaagcttacagagtttggggaactaaagaggacataactaaattctcacatttaaaaatagtgagcatggagactggagagatggcttgtgattaagagtatgtgctgttcttgcaaaagattatagagtttggttccaataatccatgttaagcagctcacaaccatgtttactccatctctatagaatctgatgttctcttctggcttctacctacctgcacacacatagacacataatcaaaaataatacaagttctttaaaatataatgaacacagagaccctcagaaagcaagttgtgagggacagtgtgtacagaaagcttggatatgaggttattttcaaggcttgcgaataaataaaagtgctgtttctactgttcttttgtttgcttttatgtaaaatgcaattgctgtcatgtccctgccaccagtgttaagtgtcagtccagaagatcaggaataactttctttttcactgtggctcccaaagtttctagagaagtatagtcaattctgtcctgtactaagaagactaataaaaggtcaagaagggtgtggggtgagagggaactcattaaagtagacatctgcccattatttattaacactaattagaccaatgccctgcaattatattcttctaaattctactccagaagaggggaatggggttctaaataagtgtttatttgaacagaaaattattctacttagactaaagaagatcaatacacttccacttacctgaagtttctaagtgtggtatcttcaaataactgaccatcctatagttgtttttacctattaactgactttgtggaaccaaccatgccctctaccaggttacttaagggctggtgcaagacttctgtttggattgatgcatatatttctgaatttatggattagctgagttcttaaaaaatcctcctaatcttataaattcttgggaattttaaataatgaataatgagtatccaagttagaaaagtaaatagaagatgtatagttggaaattcttctctatctcgtctggtcccactgggtaggtttctctcccacccatcaggtccccacagtcacttatggaataacattctggggcttaatatcaattataattgtttggccaatgacttagacatattactggctagcactctcttataaatgaacccatttctattaatctgtgtattgccatgaggctgtagcttactggtaatattctggcatgttactcctttggtagctatacagcatctcctcaactcctccctctttctctccataactttgcttggatttcccacctagctttactttgtctggtcattggtcaaaacagctttattcatcaaccaataaaagcaacacatatttgcagcatacagaatgatatcccatatcagagatgtactatttttcttggcaaaatggtatggacaacaccaaaactatttccacggcaatgggtacaaaacagctttgtagtgattaagggctttcagagttacattgttctaaaagctacctggaaattctaagtgaagtgaagtgaagtgcataataatcagggataaatcatcatataagacaaataaaatcacgtaggcaactaagagtcagtaaagccattaacaactcagttggaagagaaacattatccaatatatcttttcactcaggaatttaaatctacacaacatagcataattacccaatcccagctaaatatctcactgtttcttctttgccagtcatatttcaaaggcactgagatggtggcatcccatttttgtagtagtatcatatactttttaattgagagcagatggctggattatactctatagataatatatttcctgattatgcatcctaggagattaaaaaaaaagcttaatctccaacccttttccttacttgaggcaaaggcacatggggtttgttaaggagattagtcacatcggtgcaattttaattctccccccaccccgaggattgtattttctgttgttagctctatataaataatgaaaattctccttggggttaactcagaggttgatctctgcaggttggcctgactcgctatgtgaaacctctagctagggttgagcatgccttcgaaccaaatctctttttcacagtgacatgtgccactcagataagacatagacagggttgtgtttttgtgaatgtgtatgtgtgtatgtatgtgtgtgctcataaccgggctatctcagtactaacaaaactacttctgtgaagagatggcaataatgaaatgtttgtaggactggaaggaaaaatgtttttattgtgtagatgcttatataccacaaccactcccaaaggtaaaaatcatttttatcttcaaatgtaataacacacaaagcacatgcaaaccagatgagaaggaagtgtagaattgtgagttagtggagggcacattggaatctgaaaacagctgagctctgtgtgccatacctgggaactgatgtcctgtgagaatataacccagtaacttctctatagaagatgagcctatgagtaccagactcttaacctatgctaggcaccatgtgtgtttggtgaggggtgtgcttttatttattttctctatatttattttctctttataaatgacttatacttgactcactgcggggagagtaggagaattggcacagtggttaaaaacgcatatttgtctcatagagaacttaagctggggttccagaattcaggtcagacatcttacaattgcctgtaactttagttctactgaatacaatgccatttttgcctctacaagcacctgcatacacacacacacacacacacaaatacacaaatacacaataaaattaaacctttccttaaaaaatgaacaaacaagggcacagagaaacagtgacttgccatggccacatgctaataataactaacacaaggattccttttgaaaggggaagacccaccaagtcgtaacgttgatctttgtacagtatagtggttgcctcaacccttagctaggaagattgcttgttggcccagtcaaaaatgcaggtatataactcatgttcccaaactacagtaaaaggaaagaaccagaactattatgtgagtcctgagatgctaacctgatgtctcccactaaagtgaatttaaggagtatgccttcctttctaactcaccgcactactctagttgaagtgatgtcctaatagacaactctgcaaagtggaaatgtcctggtggccaaaccctcagaattacaggctcattccatttgtgtgcatgcttttccagaaacaagattaaaagtcagcaatttctttaaacctcaagtgagccaagaagcctgtggttactgctctgtatgaaccagaacaacgtgtgccatccttcccactgtggcttttcaaaaatcaatttgcattgtatttcatccctaaatgcttttgttgagagtattctagtatttctaatgtaatctctcagtataactataacattcctaaatattcagatgttatgtcagtctagaattcccgaggaaaacattttacttggtaacgaatatgtgtgtgtttactatataggcacagatatatctaataccttgaatttacatgaattatataattattgcacttcatccttgtatagtcactttgccactcaaataagacatagataaagttgtattttgataggtgtatgtgtatatgtgaaattacaactgagctatctcagtactagcaaattacacttctgtaaggatatataaataatgtaatgtttacagtagtgtagggatagatgagattacaatatgctacaaccacttataaagatataaagcattcttagcttaaggtactataaaaacaagtggtaattgggatttgccccactggccacatagttggatgtttaattccagcacaggctgctatgttgagataggaatttataatagcctgcatttcactttgtgcatatgtgggtgtgaaatatgtctgaaattatagtttcatttgtttgaattatcatttgaatggcttttccagagtaaggaaatgatcttgcacttgtgttggttctttgggaagaaaattctcaaatgactttgatgatgtgtgggataaatgggagtctctggtggtgtgtaagactgataactaattggggttttgcaagggcccatttcccttggcagtttctaccaggaagagatagtgaaggctggactgagctaacataccaccagcataagtaaacattgagaggggcagatggccaagaccaatcaggagtctaccaacagcttatgagagatatgatcttgttaaactcaatcattttgtcctcaattctttattaattacttcctgtgtgattcatttctacatggtgtcactccttttatatcctataaaccacggtgttattctacacactgaaatttagatagtcatttttgtggcaggaagttctaatacattggatttgtctgaagcctccaagtacatctgcaattatcttgggtgtgctgtctaaagagaactatgaccaaatgatagtcatgcagtgatgcttagttaaactatgtgtataatttacttggtgatcacttatgactcccagacctctggtcttctggggtatatctaaaacccaatgagatctaactgtgtgagaaacagaagtacctctaggattctgtaggaaaccaaggttcctttcccctagacaattgcatatgaagaatccaaggcccactcaaacccaccgcagacaacaccatgtgaataacacatgctcagttcttgttccctaaatgacccaaaaaaggtgaagacagtattagagcagtccttcctctggattcaactctgaagaaattgctatgagttatattaaatccttgggattgctaactgaaaaggtgccctttttaacttcaagattttaacaaacatatcaatacatgaccccatctaagtcaagttttcacttgtaaatacatctagagaaagtcatgggacaccctgttttcaggaaactcaaaggaaaattttttaatagattagcttcattctcatttatttttcaagaacaaaattgtaaaaacatttaaaattttaattacattcttatttatgtgtgtgcaagcatgcatgcatatggcaaggcacatgtgtggaggtcagaggataacttagaggtatcacttttctccttctctgttgtggcacctggggacttaggcttagtggctgagccatcttgactactataaagacaaaaaagatgaagctatcctagttatcttactttgtttcacaatggctacatggtgatgatggtgaatggcttctaaaatgcaacccaattttactttctgttatttgagagagcaaaaaataaaatacctggtaaacactttttgcgatggtaatagcaaaattagaattaaacagggaaaaatgttatctgcagaaacaaattgaagaaaattgaactgattatacttttaaagagaatcatatgttggtgctggacaggtggcccagtcattaagagttcttgctgctcttgcaggaaatcccatatcagttcctaccacccatatcagttcctaccacccatgatgaaggggctcacaattgctccagtggcccattgccctcttctggcttctgggggtactgcacacaggtggcatacactcatacttaatttgggttttttaaaaatcattcaaaacataatttaaagtctacataaaaaatcacaaaatactctctttattgttgattctatattattttaatgagagtctaaaaataaccataactctactgccaaatttcctttttccacctcttctgtttagtttaaatgtaaaatctgctttcacatttgtccatggatttatagtgcttgaaataaaatgacaaattattttgtggtttagtggtttaattgcctgccaaatttctaaactttcttagcatgtgtgttctgcattccctttgcctcattttctatgtaaaatggaaatgaataagtgctttttggaagagcttagataatttcaaggtctgcttcctgccttccttaaagtgtacgttcaagtccaagatatttgttttcttttcactttgcaggaaaaaaaaatgcctcgcttctcccacaaattcagtataggcatactggctgccttccttcttgggcaggctgcctaagtatttaattgtccaatcactacatgagaatcattttgcccaacagtaaaatgaggctgcctccatggtagcagggagcagctgtcaaaggcataagctctgctaccctgcaggctggggtctggcacagaaaagattgcatctccatttccaagatgggaagaatggtggtccatagccaacggcacattactgttttaggaacttggctttgcctccactggcctcctctgtcatcctcatcacctttttcctttctgtggcatgctctcaccactgatcttcacagggttaggcttgtttttgttgttttgttttgttttgtttcgttcttgtgctagtatctctttcacttccatagttaattccccaattgcttgctattgtgctcagtaattatcagtttcaagtcagctgtgatttataatgtcaccttgaatattcagaattgatttcaactcccctctgagcacactctgatggggatttgggaagatgctgagggagagaggagtaaactagggagttgggtgactgccagtgatgagaaaccctgtgccaaggagtggccagggacggaatcacagtctcacagagctttctagttaattagatttggtcacatgacctttgcaactctgccaattgcaagaaataattgggcatacattgccaggctgccagggttctgctgccatgtctggttaagacgtgaggtctctactagggtcatattcacagagcacatcatgaaatccctcacactttcctagtgaagtttattttatctgcactttgttggccttcctttacaccttatacttgtcaatgaatcaagcactttgtatgacttttctgctcttaagtcctttgggaggatggtgtgaagatcagcttaccgtgttctttctcaagtctcaacgtgtcttcatttcttgcatttgatcaccgctgcctcactggtatcgcacacttcagactctctactgccatccctctgtttttaccatggcttctattgctctgcaactgaaagccatcactaacagagaatgctcagattcccctacaagtgagaaaaaccaaaggacttttgaaaactggaggagttccatgatgatctgaaaaggatgcctcacctgttctcttaccttgtctgtgttcttcctttgtagcttgtgaacagacagggtgagcactgaaatgcctttgtaatacaatcctgtgtcctgtgctcaagacaagaagagcacactctctcctggcaatccttctaagagttaacatcttaatgtttccagaactcagggtcccctttaaatggttcagtcttgcaaataaaataacttagaaaaaactttgaaggcaacttgagagcaatttttttggaatatgacaagaaaaaataagatgggcaatctttacagaaggagatggaaggaagctggagaagggtaggtggtagttacaattgttgagttaaaaggaagtcaggtggagtcagcaacggaagtcagcaagcagcaactttgaggagggaannnnnnnnnnnnnnnnnnnnnnnnnnnnnnnnnnnnnnnnnnnnnnnnnnnnnnnnnnnnnnnnnnnnnnnnnnnnnnnnnnnnnnagggagggaggattctcagaaaactggcacagggatgtctcttcagagaatatgaaaatgcacacacagaggttgggacaaataaacttaagatttggattggtgcctagaaagtaggaatagaaaaaggaagaatataaaggttaaactttctgtgttatacctcaggaaaaaaaaaggattgttagcagtgttaattatctgtgttgaggaataggcttctggggaacataaatgggtgtctcattaagtggatacttactgcttgtatcttcttaagatatctctaggtactaaaagcaggtgccactaaataatcttaaattatatctggaacatttcatttaatatttattaggtagcagtttgtgcatttgacaataacttattataaaaagcagcttgtatattacatgctcctgcaggccatatacgtttctcattcattgatcttggttagtgacctgtgaatctgagtgcttctaggttaaagttgatgtgtcacttgtctccaaatcagggtgcagcactgaccatggggaatctgagaagctaagaccttaagttctgttcttatgtcaaatctttctgtaccactgctacacttgtgactcttagatttatgtgattggtttatgtttctcaccaggctcaccaattcagtggcacctcatggatctctgaaactcaacatatttaaatttctgacttcacacctactttgcaataggctgcacatttccagtttcccaggtccttgttcccatatgtgtctcttctctctggtaacttacttccttgttactgtcctcaaacaccatggctgaaagcaatataagaaaatctatctgtcttgtgatttcaaaagtctagctgtccataatggcagagacagagtgggggcagaagcaagaagctgagagtttgcctctcgacctcacacaaactgaaagtgtggcaaggcaataaattctcaaagccaacctccagcactctattaccttctgcaatgaacacatcctgaatgttcagtagccaccaggcagcagcatcaatgaaagatgaggtgcttaatagctagagcacatgggggacaattatttttatttcacatcaccatactatgatatctgctgccttctaatattggctctactttcaaagtatacacaaggcttaaaatacagaatgtcattctgtttctgcatgtgtttactgtttgtttactattatatcaatgagaagcaacctatgtattatctcttcatttgcttagttttttgtttttgttttttttttgtgtgtgtgtgtgtgtgtgtgtggttttattttggtttgtttgtttcagacagggtttcttgtcgtctaggatgacctccaagctattgtcaaagatagccctgaacatctgatcatcttgcttctacgtcaaacaagtgccatcatgcccagccaaaactgagtaatcttttgctctggtccagccttggctctctgacctgttttcttccctacactaagaaaagtacaacctgaataatcttttcaatgttcagtctcacttttgtcacttctatttggaaacctctcttagtttgttctgcagagcacagtcgtcttttcctttctgaacaacagaaacagtcttctcaagcttttccttaccactctgtcaactcactgtatagaaatgttttggtaattcacagggataattttatttgtttagtagcttagtgttataaaagtcagaaacaatgttgcttatgtttagaaagtgtgacaagacaatgagttaaataaaattcataaaacatgagaactataaaaattaagggaacttttctttaggtttgacctcatgtgctagccttcagtagaccagaccaaacaaaacacagtcattaattactaaagtgacataatagaacagaaactttcaggaaatagagaggcacataaacagattcccttgtcccccaaacattagatagtgttcctgattccgtatagtatagcattctccttggttccttccaggaaagcaaacagaagaaataatctaatgcaatcctatctacttcctcccattgttttgttttctggtttctactttgcaaaacccacaactgctgctttgagaaagccctcattctatcacataaaatgaagactacccaaattattaattacaatgaaatcctacttgatctatgaatgcatttgtgtatttatgtcttttgacagaacaaatgaaaatgcattgcaaaataaatatgcttgagaataaagtgaacgcaatggaagaccatgattgttttgcagctgggattattgaaaggatgatttacagaggtcatagtccagcttttggacaccgtctcatacaaagtagtcaaaataagatttctgttatcgtgaagaatattctgtcaacaatcatgatggtggtatgggagatagcatcatggcatgtgaaaaagattagctctgatagtttgtttagtctgtaaaagaaagattgacatttctcagtaagaaaagaacaggctgagaagcagcttagaagctcaaatccatgtggatgcataggttagatactgagaaactgaatgtgtcatgagataacacaaaggggggcagtttggagaacatttttctctttgtaatacagattaattaatgaatgtaagacagtgatcattatcattatatctaacaattattatttactatggattggaaccgattgaaaatatgcacttctcctttcatttcaccatcatcagttttatggcataaattcccatagaagatctcagggctacagttcaaagccaggcttaattcaagggcatgttactagcctgtggatatgaaatactttgctgaaacaattcatataacattcagacttacaccactcatttcacaaagtagccggagcctgtgaccagcagagtacagtttgcagtgaggccatatgcagtagagagacctcagggtgtgacataccaggttggaatgcctggtgctgacttgtggtctcacttcaccttccacactggccagtcctgatttccttaccgtgagttgtcatgcctttcacttttacttataattaagtttgtaaaatctaaaaagatgctggagtgtaagataaaaattattgtcacttggttttgaaatattaggagaatacttttcctggaactctttggattcttaatctgtcaaataaaattggtgatattcttgacactgttgattctaaatagtcaacaagatggcatatttacaaaatccaaagatccttattaatgataaagtatgtaaaatatagttatttgtcatatttatgtgtcccagtgccttataattgtactagaacaaagttcacaaagtgtatattatatgagatctaatttatataatgtatgttgatgggggaagtacttctgtgtatgtttatcttatagattgttgaataaagttctttttggccaatgaggcagcaagttagacaggactaggagtcaaagtggattctgggaaatgtagtagagaagtggtgatctagtcaggaagtgacataacaaggagaaacatattcaagcaaggagaaacaggaagtgtccctttccccctccgctcttcctccagtggcacaatgtaatccaccggcaaggaaggacaccaatggaaggtgttctataagataaatcttataaaatatatagatttatgataattaagactgagctaacagatgagaatcctagtcattggccaagcagcatttgaacctaatataagtttctgtgtattaatttgggccctaacttgggcgggttgctgacgtaaagcacacacgtggtggtggtgcttggaggcctttggcagaaagatttattctaacagtatatttataatatttgtctgcttctgatatatatattatttgacttaacaagtatcagtgaaatatcttcagtatgttaagctggataactattttgtaaggcatagagatactggggatctcctgtgtttactgtgatactgatgagacaataaggccacacttgtgtgaagaactgcaaaacatctggcatggcactgccatcaaagagacttgataacttgctatagttgcagagatactggtatactgttaggtgataggaaggtccctgataaaggcctttatcattcatgggacagccagtatcaggaacttcatattccaactgaaatatgggctgtttgtatgatttgatgtagaataagtgatgctcagaatacatgaaaacatggttttaaatctcagtgccacataaataagtcagctgatcaagtaatgaaaattatcaaacactgaaaacactttacaaatagatgtttagaaatttgcttttctccctgatattctaaatgagcttgtaaaattagaggagaataaatttaatgaatattaaaatgttaaatcagttgcatttaataataacaaaatgttttgttttccaaattgaattaaagctgtaaaattggcttatgaaaagaaattaatagcaatcatgatttgaaaagcttgatgtcgccaaaatacaacacttacataatagcatacataactggggtgaacatatgaacatatacataaatttgtgactcttattaactgtttacattatcttcacctgcctttcatacaaattattttaacaccatggtattttgtgacagattgagaaccatagtttaaaacaagaaaaaaaaatagttatagttttctattaaaatgtattttttttggaaaatatattgcttttttgtagtctttggggaaagcacattaattgacttctttccagtgaaataaatccttctccttaagtctctgagtcatcaggagaaacacctctttctaccaacatgaaagcacccttaatacttgaaaagtcatcttttgttttgaaaataagggacctagcagagcttaacccagagtaaaaaatgcttacttttctccgtgtgcataaaatacctggtaaaagcaacttgagggaggaagaggttattacagctcaaggtttgagtgtaccatccataacagtgggaaagcatgaccacaggacagtcaggtagctgatcacgttgcatctgtattcagataggagagaaatgagtgctcgtgttcagcttgctttcttccttttcactcatcaggaccccaggcctcagaatggtgcctcctacacttagagtgaaccttccactttcaattggtcaaatctaaaatccctctcaaagacatctaggtgatctagattcttttaagttaacagtcagtattagccatcacagagtgcatattttagttcaggcttcattgtggtaccactggaacacaatcctaaatgcatggtgctatttcatgtttatatttgtctgtgaggtgcttgaagctgtctataaaggtccactctcaatactttatgagtagaagcggaccatgcaaagcaggaagacacttgggaatgcaaactttgtccaagataaaaaaaaaaaaagcatttgatgataccattcatttgagaagaatttacaatagatctaaattagtcccaggttggtgaagaatttcttaataaattaatgcttccttttcattacaaaaccacccagcaaagagaaacaaaactagggaagaaacttggggagagtgcaggaccacaagtggggcaaatacagagaatgagaagaatcaatcaagtcagggaccaagcccacaggggaggtgtatgtagtttgtagcatgggtggtggctgtagatagtagacttctcaacgaatgcatttccaagcccagaaatagtgttaagcaaagaagaaaaatcttaaaaaatagctaaagtgtgacccagagtgtgctattaggaatacaaatccagaatgaaatctctgtatgctagtagcacatagtcaaactaacctaaactaaccattctactggtgataaattatttatgatttattatgcttgcctgaaggtacagaaagcaaaactagcacactagttagctatgtagccaggcagaggtggcacataactttaatcccaggactcaagagataacggcagatggagtccaagaccacccttgcctataggacactgaatcagagctcacacctttaatcccaggatttgagaggtaaaaggtagaaacattcaacctgagtgttaatctctagtcatgctgaggagagcatagcactctgagtgaatctggggagcagtgaaattgggagcagtctgaggattgcctctttggtctgagtataggtagaggtaagagctagtggccagctgctttacctctctgatatttagcttgaagctcaaaccctaatatctgtctctgggtcttttacttctcatgttacacattcttgcctagcttggagttcagaattagctctctaaaatgtacactatggggagggtgaaacatatatgattcatgaaggttagtctagttgtacatgagaaactttttaattaattaattaaattttctcagattggtcacagtttccccttccttctcttctccttccagtagctccccacaacctcctctgccatgaccactcctcctttctcttcagaaaagcataggactcccatgaatatcaaccagtcatggtatatcaagtttcagtaagactagacacctcttctcctattaggttggacaaggcaacacagtaggaggaagggtccccaatgcaggtaacagagtcagagacagcctctgataccactgttcagagccccacaagcagatcaagctacataattataatgtatgtgcataggtcagtcccatgcatgttctctggttggcaattcagcctctgaacccatatgagcccaagttagttgattctgtgggttttcttgtggtgtccttgtcacctctgtttcccataattcttccctagctcttaggaaaacataaatcaaaatgactctgagattgcatcttacacctagcagagtggctaagataaaacacacaagtaacagctcatggtggagagaatgtggagcaaggggaaaactccttcattgctgatgggagtgcaaatttgtgcagccactttagaatcaatatggaagttgctcagaaaacttgcaattgacctacctcaagacccaactaaatcactcctcggcatacacctaaagtatgtgccaccataccacaaggacatttgctcaaccatgttcacaaagtaatatccagaaagtggaaacaaacctagatgtccctcaactaaaaattgatgaagaaaatgtgatacattgcacaattgagtattactcagctgttaaaaacagtgacatcatcaaattcatcagcaattggatggaactagaaaagatcattctgagtgaggtaacccagattgagaaagacaagcatgatatgtactcacgtatacgtgcctattagctataaagtaaagggtaatcatattataatccacagacccaaagaaactatgtaacaaggaaagcttaagcaggaacacacaaatctcactgtgaaggagaaatagaataggcatcacaggtagttgccaagggatctgggtgggggtggggtgggcatgggaacaggagggatcaggttggggaaggatggaaggagagagtactgggaaagacaaatggaatcggggcacctctggaatgagctagaaacatagtgcaatggaaactcccaggaatctatgaaggtagtccctagctaagactcctggtaatagaagaaactaagcctaaacctgccatctcctgtaaccaagcaagatttccagtggagggagttgagacaccaacacaaccacataacctttgacctataatttgccctgcctacaaggtatgctgaggtaaaggtggtgcagaaattatgggagtggccaaccaatttctggtccagcttgaaactcatactgtaagagggagcccagcttaccactgacactgcttggagggccaggacagagcctgtacagctcagaggcctagggtagaatcaaacatgattggcaaagaaaaaaaaagaagtcaatgaaatgattcttaatgatactctgctatcctcataggttgttgcccagcccacttctcatcagagaggtgtcacccagcaactagtggaaatagatggagagattcacagccaaacattaggcagacctgggagaattctgtggaagagggagaggaaggattatggaaagggatagctttcagtgggatttgcaagcctcccaaagcagaatcccctttctctcttatgtttatctcccttgttaaaatttccattaaggacactagataatgtttttaagtaaaaatgttctaaacaaagcatatcaaaagtggaaagcattgtcagtaacagttatcaatactggaatgctgagaggtgggcttttcatcattggttccctccccctacacacacaattttagagaatgtgcggaagagtctgtgtggaaatcccagtggagggtgggggagatacagtggaatgtgttgttcacatcagcagaagcctggtgcagtgatcctctaaagacaataacattcatcttatttcttttgtttaaatggaaaacctaaatgttagtaaagagtagctcatcttgccagaaaaaaaatacttctggttttctgtatataaatttctggatttacagaaagaaatcagggtaagttgatgttcatagctgatgtggaggctagctggcctgtgagcctgtgttctgtctctgcttctcttcctacatctgtcaccctgtctgacttttatgggttcttaagaacagtaatcaagtcacaagattttgttttgagacagggtttctctgtggctttggagccagtcctggaactagctcttatagaccaggctggtttcaaactcacagagatccgcctgcttttgcttcctgagtactgggattaaaggtgagccccaccaccgcccagctgtcacaagattttttttgggggggggggtaaacatttgcctaatgagtcatcttccaaatcccccaaatttagaatttttaaagtaaaatgcagtataggaactgatacaccatgtgaaacacattcctatgacacctaacttttacaataggacaaattgtttttaatagccaatagaaggaagatagaggtaccaagggacacagagaaatgaggggctaaactgaggccccaaagacagcttggaagaccccagtgtcacataactgactgagcaacagatgaacactggaatctctggcatgaactacatggtgagcaataaagactttttgaagtaaatttagatttagctcagtagtagagtgctttttcagcttctgtgagactctgggttccatttcacttctgtcatgaataaacaaaccagcaaagaataaataattaagtttcatgcacgggcagtcatttaacttgttttaactcccagaaaatctgggatacaacaatgactactgcaggacaagtagttagaggttggtaaatttcattgtattctacattctcaatcttttcttattcccattgtttccatcctggacacatgagattacaacatcagaagaaatgagagctttcctagacagctcctgggtctggttctggcaaactacagtgtagggtaagctgtagccatgcctacttaggggctgactacaggtgtgcctgaccacactttcgagggcgtgatcagggtgacatagagcgagacttgaaggggacttcgtctctcttttggtttcacttttcggtttcacttttaggctggctaggttgctctgtaagtaattaaatacccttatatttccacttggctccgtattgataatttcccactatactacagccaatggtctgtgtgtctgttctcagatgtccatattaaaagtattttgtagcctattgtaaaattccacatatgcttctccttttctggtttgcttgtatacattaaaatactgtttacacagagagacacatacaaccacacattcaaacataaacatactatatcacacacagatgtcatctcatatcagacttgactttaaacccaggaccaagccccttcctggaatactgaccctctgagtgtggggcccaccactgaaaattggaaaagaaactttttctttcacttgggggatgggggattctcctgaagttacccttgttttgaaaggcatatagtaagctccattaagcattgaattgaagaattacatggtatataggctatcctaaagactacagaaatgttaataccccatcattacacagaatataacaaagacttggaggtatgaggctgatagatctttggaacaaataacaaaatgcaaggaaagggaaagtaaaatcactattaacatggcttttacaatttttttcttaaaatttttaacatcactgcaccaaaaggagcctcaaattcacagtgttaatgtcacattagcatatcttttcattctataaactatatgtaagttctttttccacagggttatggtagtaattattatgaaaatgtattttattccatatgtcatgaaggaagcagcatctcagacagatataggtcagtaaccatggtaatagtgcactctatagaacagcataataatgccatgctttccttggaagggacaagttcagggatgtggaactgagtgggtactaaaggagaaattatcgggtgatctggatggacagcatcctatatgtgttttcagacagcacatgaggttctttccaagaaagtttcatgtgcacaggcaaagtaaagtttgggttatatgatcagtccagattttgctgaatgccatttatttcatcaaataaagagctaaagaggaaattcttgaagatgtgagctgtggtaactgtcatccaaatgtggaaatatatatatatattatgcctcttgccatatatatatggcaagaggcataagtattatgagagaaacaaaggctacaaggtctcttgagctggcagtgtgcctgacttgtgctcatgtgaaggatggcatgaccctttctcttgcagagtgtcttatccactattgtagtgctgtgaagagacaccatggccaaggcgactctcatgaaagaaagcatttaattagggcttgcttannnnnnnnnnnnnnnnnnnnnnnnnnnnnnnnnnnnnnnnnnnnnnnnnnnnnnnnnnnnnnnnnnnnnnnnnnnnnnnnnnnnnnnnnnnnnnnnnnnnnnnnnnnnnnnnnnnnnnnnnnnnnnnnnnnnnnnnnnnnnnnnnnnnnnnnnnnnnnnnnnnnnnnnnnnnnnnnnnnnnnnnnnnnnnnnnnnnnnnnnnnnnnnnnnnnnnnnnnnnnnnnnnnnnnnnnnnnnnnnnnnnnnnnnnnnnnnnnnnnnnnnnnnnnnnnnnnnnnnnnnnnnnnnnnnnnnnnnnnnnnnnnnnnnnnnnnnnnnnnnnnnnnnnnnnnnnnnnnnnnnnnnnnnnnnnnnnnnnnnnnnnnnnnnnnnnnnnnnnnnnnnnnnnnnnnnnnnnnnnnnnnnnnnnnnnnnnnnnnnnnnnnnnnnnnnnnnnnnnnnnnnnnnnnnnnnnnnnnnnnnnnnnnnnnnnnnnnnnnnnnnnnnnnnnnnnnnnnnnnnnnnnnnnnnnnnnnnnnnnnnnnnnnnnnnnnnnnnnnnnnnnnnnnnnnnnnnnnnnnnnnnnnnnnnnnnnnnnnnnnnnnnnnnnnnnnnnnnnnnnnnnnnnnnnnnnnnnnnnnnnnnnnnnnnnnnnnnnnnnnnnnnnnnnnnnnnnnnnnnnnnnnnnnnnnnnnnnnnnnnnnnnnnnnnnnnnnnnnnnnnnnnnnnnnnnnnnnnnnnnnnnnnnnnnnnnnnnnnnnnnnnnnnnnnnnnnnnnnnnnnnnnnnnnnnnnnnnnnnnnnnnnnnnnnnnnnnnnnnnnnnnnnnnnnnnnnnnnnnnnnnnnnnnnnnnnnnnnnnnnnnnnnnnnnnnnnnnnnnnnnnnnnnnnnnnnnnnnnnnnnnnnnnnnnnnnnnnnnnnnnnnnnnnnnnnnnnnnnnnnnnnnnnnnnnnnnnnnnnnnnnnnnnnnnnnnnnnnnnnnnnnnnnnnnnnnnnnnnnnnnnnnnnnnnnnnnnnnnnnnnnnnnnnnnnnnnnnnnnnnnnnnnnnnnnnnnnnnnnnnnnnnnnnnnnnnnnnnnnnnnnnnnnnnnnnnnnnnnnnnnnnnnnnnnnnnnnnnnnnnnnnnnnnnnnnnnnnnnnnnnnnnnnnnnnnnnnnnnnnnnnnnnnnnnnnnnnnnnnnnnnnnnnnnnnnnnnnnnnnnnnnnnnnnnnnnnnnnnnnnnnnnnnnnnnnnnnnnnnnnnnnaaactttcaatcactatagatggagaaaacaagatattccacgacaaaaacagatttaaacaatacatatctacaaatccagcaatacagaaggctctggaaggaaaactccaacccaacgaacataactacactcacaaaaacactggaaatggataatctaattttaccaaacacaaaaagaaacagragggcaaaatccacacgcaatggtaccaccaacaataaatccaaaacaaagaagaaccaatgaacagtggacattaatatccctaaatgtcaatggtcttaacttacccataaaaagatataggctaacagaatggatacgaagacagaatccatccttccgcagtttacaagaaacacacctcaacttcaaacacaggcaatatctcaaagtaaaaggatgggaaaaattttccaatcaaatgggctcaagaaacaagctggggtagcaatcctaatatctaacaaattagactttaaactgaaagcaatcaaaagagatgaagaagggcatttcatactcatcacagaaaaagtccatcaagatgaagtctcaatcctgaacatatatgcccctaatacgaaagcacccacatttgtaaaagaaacattgctaaagctcaaaccacacataaaaccacacacacttatagtaggagacttcaacaccccccttacaccattggacagaaccactagacagaaacttaacaaagaaacaaaggatctgaccgaagttatgacacaactgggtttaacagatatctatagaacattccatccaaacacaaaagaatatatcttcttctcatggccacatggaaccttctcaaaaattgaccacataattggcagcaaagcaaacctccacagttacaaaagtgttgaaataaccccctgtatcttatcagaccaccatgtattaaagctagaattcaacagcaatacgaattgcagaaaacctatattttcgtggaaaatggataacacccaattgcaccattcctgggttgtggaagaaataaaaaagaaattaaagacttcctagaatttaatgagaatgtagacacaacataccagaacttatgggacaccctgaaagcagtgctaagagggaagttcatagmactaagtgctcacatgaagaaactggaggaaagtcacattagagaattgacagaacaactgaaagctttagagcaaaaagaagcaaacacaccaaggaggagtagacgccaggaaataatcagcctgagagcggaaatcaacaaagtagaaactaggaaaacagtataaagaattaatgaaataaagagttggttctttgagaagatcaataagatagacaaacctctagccaacctaaccaaaaggcagagagagagcatgctaattaacaaaatcagaaacgaaaggggggatataacaacggacactgaggaaatccagagaatctttaggtcatactttgaaaacctttattccacaaaattggagaatctaaaggaaatggacagctttctggataaatatcacttaccaaaattaaatcaagatcagataaatcaagatcagtttaaatcgacctataacccctaatgagatagaagcagtaatcaaaagcctcccaaccaaaaaaagcccagggccagatggcttcactgcagaattctnnnnnnnnnnnnnnnnnnnnnnnnnnnnnnnnnnnnnnnnnnnnnnnnnnnnnnnnnnnnnnnnnnnnnnnnnnnnnnnnnnnnnnnnnnnnnnnnnnnnnnnnnnnnnnnnnnnnnnnnnnnnnnnnnnnnnnnnnnnnnnnnnnnnnnnnnnnnnnnnnnnnnnnnnnnnnnnnnnnnnnnnnnnnnnnnnnnnnnnnnnnnnnnnnnnnnnnnnnnnnnnnnnnnnnnnnnnnnnnnnnnnnnnnnnnnnnnnnnnnnnnnnnnnnnnnnnnnngaaaatccatcaatgtaatccatcatataaacaaactgaaaaagaaaaaccacatgatcatctcactagatgctgaaaaagcctttgacaaaatccaacatcccttcatgataaagatcttcgagagaacaggaacaacaggaacatatctaaacatgataaactcgatatacaccaaaccaatagccaatatcaaagtaaatggagagaaactcaaagtgtttcctctaaagtcaggaacaagacaaggctgtccactctctccatatctcttcaatattgtacttgaagttctggctagagcaataagacaagaaaaggggatcaaagggatacaaattggaaaggatgaagtcaaactttcactatttgcagacgacatgatagtctacattagtgacccgaaaaactctaccagggaactcctatggctgataaacaccttcagcaaggtagcaggatacaaagtcaactcaaaaaaaaattaactcaaaaaaatctgtagccctactgtatacagatgataaactcaatgagaaagaattcagggaaacatcacctttcacaatatccacaagcaacataaaatatcttggggtaacactaaccaaaaaagtgaaagatctgtacaataagaactttgagagtttaaagaaagagattagagaagataccagaaaatggaaagatctcccatgctcttggataggtaaaattaacattgtaaaaatggcaatcctgccaaaagcaacctacagattcaatgcaatccccatcaaaatcccaacacagtttttcacagacattgaaagaacaatactcaactttatatggaaaaataaaaagcccaggatagccaaaayaactctttacaataaaggatcttctggaggcatcaccatccccgacttcaagctctactatagagccatagttctgaaaacagcttggtattggcacaaaaatagactgatagaccaatggaatagaattgaaaaccctgatattgacccacgcacctccgaataccttatttttgacaaaggtgctaaatctatacaatggaaaaaagatagcatcttcaacaaatggtgctggaacaattggattcggacatgcagaaaattgcagatagatccatacctgtcaccatgcacaaaacttaactgcaaatggatcaaagatctcaccataaattcagccacactgaatcttctagaagagaaagtaggaattacccttgaacaaattggcacaggagaccgcttcctgaacattacaccagtagcacagacattgaggtctgcaattaataaatgggacctcctgaaactgagaagcttctgcaaggcaaaggaaacagtcagtaggacaaaacgaccacccacagaatag

SEQ ID NO: 5 - DNA, 68962 bp, Cricetulus griseus
  misc_difference 16317..16326: note = n is a, c, g, or t
  misc_difference 21699..21708: note = n is a, c, g, or t
  misc_difference 29578..29606: note = n is a, c, g, or t
  source 1..68962: mol_type = other DNA
aagtgaatacacatacatgcaggtaaagtgctcacgcataaaaatatatctttaacttaaaaaccagctggtgctggtggcacacacccacaatcccagtactagggaggaagagacagatcaagtattcaaggttattataaactacataaagagtttggggctggacctgaggtttgtaagactatctccgataaataaataaggggaaagaaatccaaaaacaaactataagctataaattgagtggttctttacaaagcaactattttgtctgggtttggttgatcatgcctttgatcctattatttaaggcagaagtaggctctctgaattcaaggccagccttgtagtcattatagctccaggacagtcaggactgtcaggcaacgattcctcaaaacagaacatactattttgctccttgaactggggccattttttttttctttttaaatcaaataatcacatcttcattaaggatgctttacttgctgattaagtggagataaaaaatttaaatgtttaagccaggcagtggtggtgcacacctttgtttcaagcacgtgggaggcagaggcaggtggatctgggtgagttcaaggccagctggtctatgaagtgagttccagaacagctggggttgttacacagagaaacaacctgtctccaaaaacaaacaaacaaacaaaatttaactgtttatactcagtgaattagtgagattgtttatttttttattttttatttttttggttttttgagacagggtttccctgtggctttggaggctgtcctggtactagctcttgtagaccaggctggcctcgaactcacagagatccacctgcctctgcctcccaagtgctgggattaaaggcgtgcaccaccaatgcccggggagattgtttatttttaaacattttgtgtatatagatgtttttcctgtaggcatgtctgtgcacctggtgcctgcaatgcccagggaagccagaagagggtgtcataccctttgggactgaagttacagatagctacagactgccacatgtgtgttggaaattgaatctgggtcctctggaagatcagccaacacttttaacttctgtgccatttttacagtccttaaataataatgatgatgatgatgttttttttttttgagacagggtttccctgtggctttgaagtctgtcctggaactagctctatagaccaagctggtcttcaactcacagaaatctgcctgcctctgccttccaagtgctgggatcaaaggcgtgcgccaacactacggggcctgaaattatttttaatgaaggagtcttttgttttttgtaatagggtctcattatatagtcctttttggtttgcaattcactgtgtagactaggcaggtgttgaactcatccatctgcctctgcaggacctaactcaaaaaagatattcattcattcgtttatttatttaatgtgtggctttgtgagtgtgagtaccaagtgccgtagagaccagaggcattggatgtaattggagttaagggagttgtaagtagcttggaactgaacttgggtcctatgcaggagcagtctgtggtcttcatctctgagctatctttccagccctgaattaatttttaaaattatgcagttaatgtttgtgtgcttatggggcacagggccatgatgcaaacatggaggttaaaaaacaaattgtggtagttggttttctccttctacttataggttctagggattgaacccaggtttttaggcttggcagcaagtgtctttttagccatattgctggcccctaatttttattttagttttgttccttttttttttttttttttttttttttttttgagacattgtttctctgtgtagtcctggctgtcccggaactcaatttggagactaggctggttttgaagttagctatccacctatctctgcttctcaagtgctgggattaaaggccagcgcaactaccaacactaattctctttaatttaaaattttattattgtgggccagtgctcacatgtggagaccagaggacatttttaggcaattggttctctccttccactcttattaaacttaggttgtcaggtgttctcagcaatcactcttacctactaagctatcttgtgtagctagcttttttgtcagactgtcttgactgctagccaaaaaataacaagacagacttcttaattatgaaagcttagatttgtccccaacgagctcatttgtttcctttgttttttgagacagaatttctctgtagttggagcctgtcctagaactcaaaataatatttttctcaaaatgcaaaaatttgggggccagcaaaatgactcagtaattaaagatacttgctactaaacctcacaaccgaagttaagtcaccaggacccatttaatgcaaggcgataactgactcctgcaagttttcctatgacaattccaacatggcacacataaaataaatgaatgttttatttttctgaagagtattttttaaaagttggggctggggataatatagcacagtaggtagtatcctgagccagcatgcatgaaaccctgaatgattccctagcactacataaagcagggtatactgaagcacaactgttgttctacattcaggtagagatagaaaaccacaaatgcaaatccatccttacctacaaagtaagtttgagaccagcctggaatacaggggatcctattcctcctaaaaagagcaagattgttgtagaatatttatttacactgtagagatgcgtctctacttaaggcaccttctcgttgatttaatacaaagctaaatggccaatagctaggctagagagaataggcaggacttctggtcagagagaggaagtcagagggacgaatcaaggcaggagagagacgtggatcgagtctgtattgtgttgaggaaaggtaaaaggcacatggcagaatgtagattaataaaagcaggttaatctgagttgagggccaggtggtggttcatgcctttaatcccagcacttgggaggcagaggcaggtgtatttctgttgcgttcgagttccaggacagccagggctacacagagaaaccctgtctcaaaaaactgggggaaaaaaaaaaaaaaaaaaaaaaaggaaagtcagagctgtaggtcaaaagtagagtgcctattttgtatttgtgaggccttaggttcaatccccagtcctgccagtctctctcttttctctctctccctccctctccccattcccctctcttgggttttgtgtagctctgagaaatcctcttgcctctacctcctaagtactgggaatacctgacttcctactgagatctttaaagcagaacaggatgcctcagtgggtaaaaagatttgctacacaaattgagacctgagttcagtttcctggatcctactgtagaaggaacactgactctctgacctccacacaaaaaccatagtaaaataaaaatttaaagtaatacaattatggtaaaacaaacttattctgtataatggaaacaaccaaatttacaatctgaaagttgtcaagcacaagataggataaggagtgtgattcatagtgctgagagacagttggaagtaaggtaaaatgtttaaactagctgttggggtatttggcatgttctagttaattggttatctgctgttataatgtaaaaagcagtgtagtaacatacccagttagtacaggacctcttgtgaaagtaaatatcagggtgtctgtttaagaaaatgtgtggccttttctaactgacacatttcatttgtagtgtctgaagtagtgtaatgagttttggttaatgtcttagtcactcttctattgctgtgaaaagaccatcagcaaggtaactcttagaaaagaaagtattaatttttgcttacagtttcagtggtggttcattgtcaccatggtggggagcattgcagtaggcaccaagcatggttctggaaaagtagctgagatatcacacatctgttccatgagttctaggcagagatactgggccttcaaagcccacccccagtgatacaccttttcttttcttttttggttttttgagacagggtttctctgtgtagctttggagcctaacctggcacttgctcttgagaccaggctggcctcgaactcacagagatccacctgcctctgcctctcgagtgctgggattaaaggcatgtgccaccaacgcccggcttgtgatacaccttttctaacaaggctgcactacatctcttaatccttccccaaagttccactaactgggaatcaagtattcaaacatagactcaatgagaaccattttcattcaaagcatcacagtttcttgtagtttatgtagtaaaggataacctgggagtatttgttgcaatggtgtctctatagcctgaaccatgtaaattaagattatagggacactgatccttgtagtctctgagctttccatgcttggtaagcagcattcaggatgttgtcttctggaagaataagtgctctgatcacggagctaccttcccagtctctcagggtctcctttatcctagactggcctggttctctcattataactgaggatgaccttgaatttctgatgtcttttcctccccaggcctagaattacatatgtatgtcactatatccagttttatagggagctggggattgaacccaggttgtgtgctagatgagctgtctaccaactgagctgcatccccatccctgtggtctcataaacacttaagattatgaagacaagtctggaaacagaatagctaaaataagatctgagttgattgtagattctgtagaatccaaaggaaagcagtccataaaaggaaggccaggagagtgtggtcagttataccaggggctaaagcaacacagtaggttttgtggttagtatgggcagcataatggaaccacacatcaaagataagagaacagaggaagggggggggcaagggagagggaaagctgctagggaaataatctaaacagttcttgcatactattttagatattttctttcttttttttttaagatttatttattatgcatacgacgacgatctgtctgcatgtgtccctgcaggctagaagagggcaccagatctcattatggatggttgtgagccatcatgtggttgctgggaattgaactcaggacctctggaagagcagtcagtgctcttaacctctgagccatctctccagcccagctattttcttttttcaattaaatttattttatgaatatgagtgtatctgcacgtacaacttcatgccagaagagggcaccagatcttattatggatggttgtgagccaccatgtggtttctgggaatttaactcaggacctctggaagagcagccagtgcttaaacactgagccatctctcttgtctgtctgtctgtctttcccccgaccgccccccccccaccaccactcctttgtttctttgagacagaatctctctgtagccatgactggcctggaatttgctatgtgtagaccaggctggcgtcaacttagatctcccagtctcagccttctgtgtgctggaattaaaggcgtgcattaccatacttagctctatttgaaaaaatattctgaatgttttattttgtgtgtcacccccattagatgtttgtttttgccatgatttggaagttttgcttacaatgccttctttgttgcagattttgtattttgtacatacattattttgtatattctgtatatgatgacttcggtgagcaatgatcgttgccgaggtgctcgggaaaaaccacagatgccaacaacacatgcaggacagccacagaaacaagtgatacaggtaagtcttgggttagactaaaagagtgagggagaaggaatgtgttaatagctcctttctagggaactcaggatttagcattgtgtttacaaactaaataagtagtatacgaaagggatgatgtgacgatggtacaatcgaacggtgttccaggagaagcatgtgtttaagcctgaatttcagttgttatctctgctacagcagttcccttccttccttctttgtctcatgttccagtttataccactaggaattaaacccagggcccctgtgttctagaccagcactctactactgaactacacgcccagctcatctgttattctttcaagtgaagtgagacatgttagtacagcacggaacatgtctgtactataatgatccagttgacaagcttcttaacagaaacagtatctttcccccttcatatgttcattattatccttacatttactaaccgtgtgtgtgcaagcttgtgcatgcacacgtgcacatagatcattgtgctttttgaagtcaaaggacagctagagagagcgagttctctccttgtaccatttgaattcaggatggaactcgggagtcagggttggccataaagacccttactcactgagccatctgcttagagatgttgctctgcttcagcttcccaggtgctggggtgtcagacttggactaccatggttcacttttatgatactttgttttatttctgatattgggttgggacatagggttttgcatatgaggcaagtattatatcaaccagttatgtcccttattcttttcaggagcttcatgtaatttcatactgaagtgttctattatgtttggtacagagtagaatttttttttttttttaagattttatttatttattacatatacagcagagggcaccagatctcattcaaggtggttgtgagccaccatatggttgccgggaattgaactcaggacctctggaagagcagtcagtgctgttaaccgctgagccatctctccagcccctagaatttttttttttttttaacaaaatttttgtgttaaattgaatagaaaaatagcttttttttttttttttttttttttttttttggctgctattaacagataaatatctcctatgttagtgcttacccctaagttctttaactctgatcagtattcttcacaaagaaagactgctgtgctgagtgttgtaacacagtcctttaatctcagcacccaagacagaggcaggcagatctctgagtttgaggccagcctggtctgtatagcaagttcaggctagccagaatcgaacaacataggagaccctgttgttagagaactgttgcggctaggctatccttttaagtttagttaatgaattgtcttgaattaatgaagaaatataggtcagaataaccaaaggtgaagggatgatgatgatgatgatgataaagttagtctttaaaaagaaattgtatcattaaaaacaaaaaagtaccaggcgttggtgccgcacgcctttaatcccagcactccctttaatcccagcactcaggaggcagaggcccgtggatctctgtgagttcgagaccagcctggtctaaaagagctagttccaggacagcctccaaagccacagagaaaccctgtctcgaaaaacaaacaaacaaaaaaagtatgtataacaggctttcttttgtgcctctagccagctcccaaatcgtgacaagaagacttgttaattagttatgaatgcttggccttgtgcttattccactagctcttataatttaaagtaacctgcttctctgtatctacattttgccttatggctttgtacttttcttttattctgtatgtcttaatttttcctgtttcttccatgtctggctgtctggcggctgcctgactggctggcccctggcatctccccctcgccctcgttttcttttctcttctccctcctctctcctgagcctagattccttctacttattctctctgcccaccaaccccgcctatccctcttctgcttagctattggccattcatctttttattagactttaggcaggcaaggtgaaacagcaacacatctttacataattaaacaaatgcagcataaacaatgtcacacatttttatattgttagacaaaagcagcataaacaaaagtaatactcttttacttgataagtaatattccataacaagtatgagcttttgaaggaaggccaaataaatgtgaatgatgcaaatggtaccctgtataccttgctagcagacttggatggattgtcagccagtttgcagactagaacagggaattagttttgttttgtttttccttctaaaagggttttatttttattgtgtttcattttcagtagtttgagacagggtcttgctatgtagcccaggatggcccagagctttcgggtatccagtactggtctcaaaactttaaatttccattcctcagcctccctggaatttggactacattaaaagattttcactaatagcctttctgtggagcctttgagggatgacttagattgcctaaaggaaaaagctgctgactgatcaatgaggatgagttcgagatcctcctgcttctttttttgggctttttgtttatttgctttgctttttaaggtatttattcaaaagtaatattacatatatgtgcattttcctgtatttctgtctgctcactgtgtgtgcctgcctgtgacggccaaaagagggtgtctgttggatcccctggaactggagttacagatggtgagccaccatgtgggtgctgaaaattgaacctaggtcctctggaagagcagccagtgctcttaatggctgagccatctccaatgctttttttgtttgtttgtttttttgttttaagacagaatgtcatagctcaggtcggtccagcttgctatatcatccaggctgctgtctaattgaatgcatacttggtttatagatgtataccatcgtgtggcttttcttttttatattttatttatgtgtatgggtattttgcatgcataaatatctgtaccacatacacagttaatagacagttgtaagctaccatgtgtgtttggaaatccaacctgggtccttgggaggagcaatcagtgatcttaaccaccaagccatctctagccctgtttcctgtttttttttgttcttttgttttgttttgttttgttttttaagattttattttatatattatgtatacaacattctgcttccatgtatatctgcacaccagaagagggcaccagatctcataatggatggttctgagccaccatgtagttgctgggaattgaactcaggacctctggaagagcaggctgtgcttaacctcttaacctctgagccatctatccagccctttgttttgttttctttaaagatttattttatctataagataaatatacataataaatatatgctctgtctgcatgtacacctgcatctcataagaggacatgagaggctgggcgttgctggcacacacctttaatcccagcactcaggaggcagaggcaggtggatctctgtaagttcgaggccagcctggtctccagagcgagtgccaggataggctccaaagctacacagagaaaccctgtctcgaaaaacaaaacaaaacaaaacaaaacaaaacaaacaaaaaaaaaaggacatgcgatcccattacatatggctatgagccactatgtggttgtggtattgtaggatggtgagattgctgagtggttaaagctcacaccatataagcctcgagttctgagtttgacaagcccaggaagacacaaaaagctgttttcttttacatgcatgccatggcatgtacaagcctgtactcacatatgttaataataataatagtaaaaagggctttaaaaaatggaatcttatgaagttgccccaagatggtctcaaaaaaattgtcttcaagccatcttcttgtcatagcctgacatgtagctgaaataattaaattttctttttgttcatttttgagatagagtctgttgagtatctctggctgttctggaacttgctatgaagaccaggctggcctgaaactcacagaaatccacctgcctctgcctcctgagtactgggattaaagtaatgcaccactatgcacttgctgataattattttcagatactgctttttataaaattatttggaggatactactaggacatttttatgttagactgaggtgtttcttgcttggtggtaaaacatttgactaacatacatcaagtgccagtttcaagacccagcacaatatacacatgaatacacacttggggatgtaacctagttatagtgaagtacttgcctaacatgcccgaatccctgggttccgtcttcagcaccatgaaaactggccatggtggaacaagcctgtactcatctcagcactcaggaaatggaggcaggagcatcagaagttcagggttatctttggctatagtgtgtttgaagccagcctacgctgcgagagaccccagagagaagagaaaatgattgttaaattatatgttaattacaatataaaaatatttcctgtaagttaccttaaagagtattggttaggatagtaattgttcactaaatggccagttgcagaccttttctgtccaagttaagtgctgaaagagctgttttgagtttgtgtaaacctgagtttgggtcttgggcctacatcattttttaaatttatttatttatttgtttatttgacagggtttctctgtggctttggaaccttttctgaaattagctctcttatagaccaggctgatcttgaactcacagagatcctcttgcctctgcctcccaagtgctgggattaaagccgtgggccaccaccaccaggcctgggtctacatctttattaattaggcaagatagaatttctggagtgcttttgttcatggcaatataacgtctgtcctttttagttaagtatatgtaggcatcagttctctccagtcagtgtctctctttgtcctcctcttccccatgccaactcagtttatgctcagcacaggctgttcctctcagcctccctcacttctgcctcctgaatagctggaatttcaagtttgccattagtaggataggcttgttcttcagtttcttgtcattgacatattaaagagtataggatagttatattctacattatctttgaatttgagtttatatgatactttatgattagaattaattatatacttttggtataagtaaatgtgatctattatttccccccccttttcagtagtaggcatcaaactcaaaagcttgcatatattaggcaaatgttctttctgcttctgaactgtagcctcaactggatgtgatttgtattttacataccatattatgatataataggttctaagtttgttctgttttaccagaacaaagtagttagtattcctctagtgtctcagagaggccaactggttttaaaatacaaaacagttttaattctttgcagaatgattataaggaattagaaattatatacaattgttatcagaaagtggtaattttttgtatatttattccacataaattataaaattattatttgaaatttgaggtggacatggtggttcatgcctgtaatcccagcagtaggcaggcttagaggattacaaattagaagtcagggtcggtgaaaaggctctgccagtaaaggtccttgctaccaagactgacaacctgagtttgaccttgggtctcacaagattaaagaagtgttccagcgagtgttggtggctcaggactttaatcccagcactcaggaggcagaggcaggtggatctctgtgagttcaaggccagcctggtctccagagcgagtgccagcataggctccaaagctacacagagaaaccctgtcttgaaaatccaaaaaaccctccacatgggtactctgcgaggatatgcatacccacatacatacaataaataaattaattttaaaaagcaagatggcaggatgtggtaattgcatacctttaatctcagcacacaggcagaggcaggcaaatttctgcacgttagaggttagcctcgtctgcatatacatagcaagttctaggatttccacagctacatagagataccccatctcagaaaacaatataagcaagtagaaaataaaattatatcaaatattatagaaaacaggtggtttcagggctggagaggtggctcagaggttaggaacactgactgctcttccagaggtcctgagttcaattcccagtaaccacatggtggctcaaaagccatctataatgagatctggtgccctcttctggtgtgcagatatacatggaagcagaatgttgtatacataataaataaataaatcttaaaaaaaaagaaatgaaaacaatgtggtttctgtttaagaaaatatgtatttatgcaacacaaataataataattaggcaaaataatatgcctacagattttttttgttactgttttgttttgagacagtgtcaactatttagagaagattgctcttaaatgtattactaatatccttttgcctttacccccttagttctggtattacagtcatggcttcccatgcccatctataaggatggtttaaaaaataaaatcggggctcagtggataaaggtatttgctgcccagcttaatgacctgagttgggtttttagggcctacatgatggatagagagactctgtctgtctgtcctctcacttctgtgtatatacatgtgtatgaatgggcacatacacagacacaaagaataaaatattacacatacacagacacaaaaatttaaatagtcaaaaataggtcaactgaatattttattgtttaattctcggatgacatgcaaagattgctgtgagttcctggctagtctagtttacatattgagtttctggctaacccatatcaacctctgccccagataaaataaaaattgtaaaccaaggagatattcctacttcaataagttatccaaagatttctggaagaccatccagtgaaagaaatgggttcattagagaatctttcagcatagttttcttattaattaaaaattatatatgtatatggttgttttacctgcatatatatctgtgtatcacttgtgtgcctggtgcccttggcggccagaagagggcagcagagttccctggaactggaattacaaactgttggggagggagcataaaccttgttttaagttggaattattagttgaccctgctttttcctcttttttccctaagctgtacagacctcttgacacttcttgagctcagcctggtaacttccctattatactcttatgtttggttctttgtttattgaataattaaactgtttgttgaataaagtatcttaaggtttgtagagtattttataaaggtaacacaatttaacattttgactgagactattactgttgtaatactgcgcttattaacagctgctaagtgaatcagctgtgctttcagaagttgtctagtctgtactctgtttagaattaaagcaatgatttcacagacaaatgtaaagaatgtttgtaaagttataatacttaaactaaaaaggcctagttttcaatagatcagtagttaatacatgtgagtaagacaaggaatagtgtctttctggttagaaatgtacaaatgaaactttcaaagtgaaaatatagagacacatctagggaataaaatggtgcttgaggccattggtaattattttactgaaaatctttgtccatgcttgttgatgcagatgcctttttaaaattatatattttttataaagattgatttattatgtatacagtgttctgcttacatgtatatatgcctgcacactggaagaaggcaccatttctcattacagatggttgtgagccaccatatggttgctggggattaaactcaggacctctggaagagcagccagtgctcttaacctctgagccatctctccaacccaaaattaatgtttttttttttttaaaagatttattatgtgtacaacattctgcttccatgtatatctgcacaccagaagagggcaccaggtctcattacagatggttgtgagccaccatgtggttgctgggaattgaactcaggacctctggaagagcagtcagtgttcttaacctctgagccatctctccagccccaaaattaatattttatatgatatttttataaggtcaagcaataaaatgtttcttaaagttgtctataattacagataatgaacatttcttaaggaatttttaggcttaaatgttgctgccttgctcttggaggcctagccagtggtggggtatttgcccagcccttagttcattgcctggcaccacaaaacaaaataacattctctataaagccagcagtgttgctcttgtttgttcagactccattagtttttcataccccttttcagaaagataacccccacatttcctggctttgttattctttgtattgttggactctatgagattaaaaacaaagcaaaatatttatttttatcattttaaaacatggggtatgtgtgaatatctgtgggcatgtgcacatttagtgttggcggcaggcaaccttggaggatgggcaggggtggatgtccagtcctctggtgttgcagtaacaggtggttgtaagctgtctgatgtggttgctgggagctgaactctggtcctctgaaagaataaatagcaagtgctcttaactgctgagacatctccagcccctttgcacaatgttattttgacattacgccatgaaatattttctctggaaactctcaaaccaatgcattccatatatatatatataaagtgtcatatacacacacacacacacatatatatatatatatatatttttttttttttttttttgagacagggtttctccatatagttttggctggcttgacctcacagatccatctccctttgccttccaagtggtggaatgttaagtttttttttttctcctctccctttttcaaatgtattttatttgaacattaatattttgcctgtatgtatgtcagtgtactatgttcatgcttagtacctgcagaagtcagaagagggttccagatcccctgggactggagttattgttttatgaaatgcctgtggaggccagaagagggatctgatcccctagaactggagttacagttgtgaggcattatgtaagttctgggaattgaacctgggtccttttaataagagcaacaagtgtttttaaccattgagccatctctcctgtccccacaaatttgattattttgagacagtgtctttttcttctttttttttggggggggggcatgtttgagtcagggtttcactgagtagccctggctgttcttgagcttgctctgtataccaggctggcctacttttacctgccaagttctgggattaatgatgtgagccaccacacccagcctgagacagtgtcttattcaccctaggttggtcttgaattctctgtagcagaggccagccttaatctcttgattccattcatgtacctcctgagtgctggtattataggcatgtacttccactctcatttctggttttgtgtggtgctggggatcaaatgcaaagcttcacgcatgatagataaagtggtctagtgagctagctacatttccacttcatatttgctctttgtgatggtatgtcaatatataacataactatagctctttgtcctccttcctggcaccaactgtgtgtgtgtgtgtgtgtgtatacatacatacacatattacacaagcacatttattttaaagatttgtttatttattatatatagagagttctgcctgtaggccagaagagggcaccagatctcattacatgtggttgctgagaattgaacccaggatctctgcaagtactcttaacctctgagccatctctccaggccccaccatgtgtatttttgtaataattctcatcttgttgccatcgaggagctacatgtgatctattattttacccagttaaaattgtttcctcttttgtttccctttttcttctcggtgagacattgactgtagctcagccagggctcatctcttttagcacttataatacctgtttgtccttttttgtttgtttgttttcttcagagatatttccatatactaaactcccacctctagctccctctccctcataaaaaatggataagttagcttggcagtggtggtgcatacctttaatcccaggactacggaagcagaggccagtagatctctgattttgaggccagcctggtctacaaagtattgtttcaggacannnnnnnnnncacacccacacacacacacacacacacacacacacacacacacacacacacggtaagtgctgggatttgaactcaggtcttcatagttgtgcaataatcactttaatgatccatccatctgtctaacaatctttctcccagtcaggctcttaactccaactatcacttctgtctctgtttttcttttcacttcattatctttgcacttgtagagtccctttactcagtcttcaagtattaaatagccgaagtatttcatatttcatatttcaggtcagtgagatggcttatcatgtagagacacttgatatcaagcctgaggacctgaattttattgtcataacctgaatagtgaaagtagagagaattgaatcccacaagtcctcccgtgtgctgttggattctgacttccagacagacagatatatacacacaaaatcaactagtaagttaaagaaaaacgaaactctgtataccttgcttccttattaaggctacttctgtaatagtccaggttcctgttgcctcattgttggatgtttaaaaagcttactcagtgcctagcagggacatcgtgataaatgtgttttctgctgtatatattcagttttgagtcattaacacagttgggtctggcatgatagcacagacttgagttacaggatcctatctatcagtgaaatagaagttctgtttttggttttgtaattactaaagataagaacttttttgttttctagaaagactgataattgttgaccagatagatcattgttagccctaccttgtttaactgtttggtaactgtttggtgttattctcaagatgccatgcatattttttgtttgtttgttttgttttttgtttttcaattcagagtttctctgtagctttggaggctgtcctggaactagctcttctagaccaggctggtctcgaactcacagcctcccgagtgctgggattaaaggtgtgcgccaccacccggccatatgctatgcatatttgaagggtgttttttagggtccatttttctgtttatacataaacataatttatatcttcaaacatgaaattagatcatgtcatattgtttagttttttttttgcctaatttccttgctgttgactttaccccttgttagtgtttagagaaagtgctatgaacagatatccttggattctttgtttttgtctttgagacagggtttttgtatgaagccctggctgttctggaactcactacatagatcagtctggcctcaagcacacagagagctacctacttctattgtgatcaaagggatgtgtcatgcttggctttttttttttttttttttttttttttttttaaaaaatttttccattgtacatttaaaaactccaatgtagctttggaaccatcctggatttcactctgtaaaccaggctggtcttgaacccagagatccacctgcctctgcctcagtcactgggattaaaggtgtgtgccgtcacctaacctttttttttttttttttttttttttttttttttattgggtttttttttttttctagatagggtttctctgtgtatccttggctggcctggaactcagaggtcctcctgagtgctgggatcaaaggtgtgcgccaccagcacctggcttgataatttttttgtctattgataaagtatgcctatttatgtctttgtttttgatgttactacagtcctggtttggatagagttagaaaagtgtctcctgtcaattttcagagtttgtgaattaggattaattagagaaactgactatgcttttactttgttttcatgatctatttactcattcattcattgagtcttactctgtaaaccaggctggggtcaccatggcccaggtagccctcaaacacattgtaatcctcctgcctcctgcctcggtctcatgagtgctagggattataggtgtgatccaccatgccctacttttctgggaagttttgatgacagtttagttagttaacctattttgagtctccctttttagtagatgatgctccccaccccattcttttttatgtttgtatgatgtgatgtgggcggcacaagacaaaatgtggatatgtaggacatctttgcgtgtccgtcccctttctggctagctggcccttgaacttcctaagcagttttcccatcacatcctttggtagacgtgttgggattatagattcacactattgcatcctgaccatttatgtacattccaggattttttattttgtctaggctatctaatttggtggcacatacttgttctaggtttccttttataatccttcaagtttcgtttttattgttaatttgtttgaggtgaggtctcactgtcttgctaggctgtcttccctcccctttttcagcaccgggattttaggggtgtgttgccatgccttgacatctctctaatgttcctttctcttttacttctaagattactactcttaaatcttgtctctttgtttgtggctgagtattttatctattattgacacacctgactgcctccctccctccctcccaatttgagtcaactgttgagcaagtagtagtactgtacctagctagctcagtagaatcgtaactacctacctaccttgctagagaccctggcttctgtctccaggaccaccaaaaaaacccacaattccccaccccccacccctctacagagtcttactttgtaactcagttgatctggaagttcttacacagtctggggtagctttcaacttgaccagctcctccaactcagtctcactagtgagtatgagtaagtagacccagttgtgaattaaatttaacgtgatcaacatgattgacatcccccttttttctttttccttttcttttctttctttcttttttttttctttttctttttttttttttttttctttttggagacagggtttctctgtatggctttggagcctatcctgacactcgctctgtagaccagggtttctttgtgtagctttggctgtcctagaactcactctgtagaccatgctggccccaactcacagagatctgcatgcctctgcctcctgagtactgggattaaaggtgtgcaccaccaatgcctggctttttttaaatttaaggagtgaatgctttcttctgtttttgtttgtttagttttgagatggggttttcatagcttcagtggctgggattcctgatcctcttgccctgagtgttgagattacagactagcactgccatcgtggctaattaactacccgtgtgtattttaaaagtgtgtgtgtgtgtgagagagagagagagagacagagagagacagagagacagagacagggagagaatgtgcgtgcatgaaggcatataagcttgcatgtgcatacgcataaaggcaagcatgtcatggtgtgaatatggaggttagaggtcaactttgtagagttgttctcttcttttcaagtgtatattagcgttctgggtattgaatttaggttactaggctcatgtaaccatacctttacctgctgagacatagtgctagcccattccctttggtgggtttctacttgttttgtttgagacagggtttcactgtgtagcttttactatgtgaacctcactatgtagaccaagctgttctcacaaaggtctgcctgcctctgtctcctcagtggaaggagtataagcctgtgtttccatgttcatctttttctattggttctgagtattgacctaaggtcctcttgcttgcacaagtacttttaccaaataagctgtcttctctgccccatgacaatctctaaaattttattttcatttatatgtatgaatttttttgtgcttttgtttttttcaatttgtgtgtgtgtaccatgtgtgcctggtactacagagaccagaaggagctattgattgggtttcttgaaactggagttactgatggttgtgagctgctttgtgggtgttggaaactgaacctgggtattcttcaagagtaaccattggtcttaatctcttgagtcatctctccagttcccatctcctaccccactttaaagtgaaagtgatatacaatgctacgaaaagcagtggaaggtgctgtattaatgaaacaggacagactattcctgtggaattttagcatctggaccactcatggctttgtctcactcagaagtgactctcatccagattcaatgtaacatgaaggctccatttcagaggctgtacttccttttggcacttaacatgttgttgagcctttgtctacagtagtgggacttctcagttgatggtggatccagggaatggctatctggtgtgcagtatgaataaatgaaagtgtatttggtccttgtgtatactggaagagattgcattaacattgtcaacaagtatgggcattgagtttctgtacagacatctttctgggtgtaatgcagtagtgtttggcagcatgaatagattgggaggacaagactagcttttagattggatataataggctgcagctgctggaattcttattacccacctacaggaaatggaaaggccttgtgaaaggtgctttatgatgcagaacttgccagttcccccatgcatcttgattaaggttccttgtaatgagtgaaatatgtagtaaaagctgaatggagttgggctgtagttcagttggtacagtgcctgcttagcatgcctaagacctagtatcacataaattgagcatggcgacacaagcttgtcatctaactgggaggtagaatcggaaagtcagaagtgtaagattgtctttgactataaagttagagccgagatttttttttttgtttttttgttttttttgagacattgctttggaggtgtcctggaactaggctggcctcagactcacagagagcgcctgcctctgtctcctgagtgatggggttaaaggcgtgagccaccactgcccagcctttatgagattcttaaaataaacctaagaaaagctttgattgctgtattgactgagaatgtgtcttattctgtcacttaggctggctcctgaacttgtgatcctcttgcttctttctcctcagtcgtggttttacagcacagtgccacacttgaccacatatttaggtttttaaatgtgttcaggagttaatgcagactttagttgagaatgctaatctagccaggcatggtggtgcacaatcccagcgctgggaagcagaggcacagggatctataagagttccaaagccagcctgctctgcttggtgagttccaggctgtccaggaatacacagtgagacaatgtctcaagaaaaaaaaaaaaaaaaaaaaaaaaaaaaaaaaaaaaaaaannnnnnnnnnaacaatggtaatttagggctagtggggagggctcaggtgcttctgacaaatctcacctgagtttatttaccaagactcacatgttggaaggagagaaacaatctccacatgggtgccataggctgccttctcctaaataaacaaacatttagttggccatggtgtttcacacctatagatctggcattctaaaggctgaggcatatgagaattatcttaaatttgaggtcagtctaggttatgtagtgacttccagtccaggctgagctacataataagactgccccaaaatcaactgtgacaacagcaacccaaaaaatagcaacaaaaattctccttccagacagtaaactggacctggaatgatggctcagcattgtacttgctgtataatcttgaggactggtttttggattccagcacccatgtaacatgctggcactcctgggcacaccaggtaaccccagctctgagggacagaggcaggagctttggtgttttcctggcttcctttaaccaaggagacatgggccccacccaggttgtgagagattaactcctcctctggcttgttcatgccacacacctacactgtgcatgcacaagagcagtcaaacagacagtaactgaagaaatgaacatttaaagtaatgctagctttactaaaaacttgtgtagagatatgacagaaagtttaatctcttttacataatttacttgttggcctaatcctggtatttttctcaaggattttggtttttcgagacagggtttcttgtgtagctttggctgtcttgggtttctgtagaccatgttggcctcgaacacacacagaaccacctacttctacctctctgagtgctgggattaaaggtgtgtatcaccactgccctgctatttttctaaaatttaagatactgtataggagccaagcatagtgttgcatatgcctgtatgtaatctcttgactttgtaaattaaggatggagaaagaagagtttaagactgggctatgtagcaagatagctcaagaaagaaaataaggaaaatccagttaggcttagtggcacaatcctgtaataacagctactcagggcctaacaggagttcaaaggccttcttcattacagagtgagttcacagccaacctagggtatctgctttactatctatctatctagagatagccctggctgtcctggaattccttaagtaggcctctaacatcttatttacacagttctcctgcttctgtctctagagtgctgggattaaagtgggaaaggcatgtcctaccaggtctggcttcagtgtaggcaagacttggtctcaaaacaacaaaatgtaaaatggattgagagggatatatatatggtacagtgcttgctagcatgtgtgaggtcctagattcaatttctgttacaataaaaacaaaacacgaaagcaaaacatcaaaccaataccacaaactccaaatgagcatttaatagtgtgtcactgcacaatgctactaatatttaattgttataaataatacagaaggaaaccttaaaattttactagtccattttctcttttttttttctttttttcaagacagggcttctctgtgttgccttggctgtcctggaaccctctctgtagaccaggctggccttgaatttattgattaaaggtgcacaacaccatgcccagcccagaagtctgtttcccatctcccccctcctcccgttccctccctccctcaactcagggtgtcttcaaattctcctgaagaaaaagatacccttaatcctcttgcctctgcctctcaggtgctgggattatgaatgtgtgctcaccacacttggttaatcagtgtttctcaaagtaatacttagtgattgagagttctgtttgactgttgccttctaacatctgtgttagtattttagctgctgaaatccactgctttttttttttttttttttcttcctaggcaacagctgaacagatgcggctcgcacaagtgatctttgataagaatgattcagatttcgaagctaaagttaagcaggtatgtttctaggaaagtatgctatgactgtgtactttattttttagttaaaatattctgtggggctggagagatggctcagggttaagaacactgactgctcttccagaggacccactttcaattcccagcacccacatggcagctcacaactgtctgtaactccagttcctggagatctgacatcctcacagacattcatgaagacaaagcagcaatgcacacaaaataaacgtttgttttgtttgttttgtttctctgtaacaacagctctgactgtcctgggactcactttgtaaaccaggttggcctctgcctccctagtcctgggattaaaggtgtccaccaccaccacccagccgaaaaataaattatttaaaagaaatattttctttatgaattaatgtgttttgcctacattatgtatgtgcactgcatgcattcttgttatccagctataatgcatgcttaagttttcagatacaatactatgtctaggagagtagcttgtgtggggtgtaactaataagtttgtatgtgggatattctaatgcaattcatgaatggtggccatgtacaagtgaagtcccagttaatgttttaggaatcaaaactttgcaagttctatgctattgacctaagtttaaacatgatctaggagttctgagaatgttgtctgtgcatatgttgtgctgactagtaggctgggggttgtggtgcacacctttaatcccagcactagggagacggagataggctgatcactgtgtgtttgaggccagcctggtctatgtagcaaattgttccaggccagttgatttgtgggtgagtctactagttttattggggagtatgggaaagtcagcctgcacttagagcctagacttactggagtctaggaaaagctctcatgtgggaggacagcatgatgctgtatttgaatagaagaatcagcaaagttaatattgaatgccactttttggttccctttaatcatcttctgatactttgatagcttatggaagtgacaggaaaaaatcaggacgaaagcatagtggcccttcacgactgtaatggagatgtgaacaaagctatcaatgtgcttctagaaggagactcggacacagtaagtgttatttttcctcagtttcaccttgtatggaagttgttgtagaggggtcggggcgtgctgtgttttggagggggtgttctgggaaataaacctaggttcattcatatgtgagacaagcactacaggaaagttccagtaacttggtattccttcagcaaaacagtttctactaccctggcccttggacatgaacatcaacctaaattaccccagctcttggtactaacaccccctaaagtgccccagcttaaagtgctctggtttgtggatattaacaccacctagagtaccctggcctatggacattaacattgcctagaggaccctgtcctgtgtacactaacaccacctagagaaccccagcctttgggtactaacaccagctgaaaacccggctgcagactgctcacagtttctcatctcagttaccacctctaacctcctcccaccccctcattggtttttttacttttgctcaggatagtctcaaacttactctgaggatgacatggaaattcttaactgcctgcctcctcttcctttgtgctaggattagaggatccaccacaagactggggattaaaatggtgtgtgtgtgtgtgtgtgtgtgtgttatatgtgtttatgtatgtgtgtatgtacaccaggtaagtgataccctaggaatagagttttgggtttttataaactgccatgtacgtgctaggaactgaatccagattatctgcaaaaccaacttttttttttgagggggggttgttttgagacagggtttctctgtggctttggaggctgtcctggaactagttcttgtagaccagactggtcttgaactcagagatcctctgcctctgcctcccgagttctgggtaacaagtaacaagtacttttaaccactgagctatctctccagccccttctgacctactcacaactttagactaacagaaaaccagggtttgctgataacttctttattaatggatattccataagcatcttctcatgaggcttaaaatacagacacttataataatcacacagagaaaactgtaaaaggcggttatgaactttattccctttatctctatgttgaaattggattgtatttggtttgtatttctaaattgaggaacctatttcagggcaagttaaaacaaataatacttcacctaaaagaaagtttattgatgattgtacccaaaatgattttcttggttacagagttggcttggtggttaagaaacctgagttcagtttctagaaccctcctgtgttagttcacagtggcctgtaggtccagctctccttttctgaatgcatttacgtacacatgcacacatgcacaaaagcctgactttgttttaaaagatttatgtattttattctatgtgtataggtgttatctttgtatgtgtatatatgcactacttgcttgcctggtgcctgtgaaggccagaagtgggtgtcagatcctatgggactggagttatatactgttatgagctactactgctaggaatcagacagtacccttaggctgagctgtctctccagcccctatacacacatagttttaaaacaaatacatatagaaatatgtatatatttctttttgtcctttttgagatttgtttttagttttattgtgcacgcatgtgtgtgtgcgctcatgtgtgcgcacgcatccctacaaaggtctcagttgtcagattccctcagagctggatttacaggcagctggagccacccaatgtgggtgctgggaattgagccgtccctccaagttttgtctttttcaggaaagtagaactaaatataaaagaattaaaatgtagggtttgaaaggtgtatgacattgatgactgtagaactctttttgatagacatcatgggagactgtaggggggaagaagaagaattttggaaaagaaagctcagaaaacaaagaaaacagagagaagagaactgagagagaagcaagtcgtggacggggaagcagcaaccgaaaaggaagaggtggcaacagaggcagagagtgtgagtacagcttttctgcttagcatttccataccctcagagagctgaaaggacagcccagagaaagcccatgaatccatctgtacgtgtaaatttcctactgtaatcactaacagtggtctgttaggtgctgtgatggggtttcctgtgagtgctggcctgggctacaggtagttagttcattttttgcatcctttaagactggtttctggtctgggcagtagtagccatgcttttgatcccagaacttgggaggcagaggcatgaggatctctgagcctggtctacaaagctacacagaggaaactctgtccatgcaaaaccaaaccaaccaaccatccaaccaaataaaacaaaactggtttctgttagagatcaagtgaactggggttggagtgggtataggttcattcactgataaatgaactatttttttcttccccagttacagacactcatagtatagacgtggatcaaattaataataggtatgcctttaatcctaagcagagtcatatggatctttgtgtttgaagccatcctggtatacatcgtaagtcccagaccagccagggttatatagtgagacactgtctcccccctcaaacaaaacaaacaaacaaacaaaaacctaaaggagataaatttaataggcagggctttttatttagtttaacctccatttaaaaatagaactggtaaaaatagggctcagtaggtaaaggtacctgccatgcctgatgacctgagttcaatcccaggaaccatgtaggtagaaggcgagaaggggacaacccaaagttattgtccaagctccgcaatgtgtgccatggcatgtttcctgtggatccatattttgacaccattttacttggaacagcccaggagacattttataattagtttattccattgactgcttgtgtcgtgtggagacctatggtactgagaaaaacagatttttttaaaaagttgatagcctggtgatgcaccttatcctagaatttgagagcttttagtagggaaattgaattcagggcccagcctgaattcatagtgaattcctgtctcaatgcccctcccccctttttttcctagttctcataaaaataattagtttaagtaaattctccttcctccagcagtgaaattacagacacccatcactatgccttgctctaaatttttgtttttggcattaagtaaactcctcctcctcttctttagattggttccactatgtagaccaggctggccttgaattcacagagatttacctgcctctctctgtctcttgtgttgggattaaaggcatgcactaccactgaccatcagcctggttttaaatttgatttaaaaattacttttaatctatttattgtttttttgtggatacatatgccatggcacacatggaggtcaggaaacaccttcaggttgtcctctctctccttctaacatgtgggtcctggggttgaactcaggtcttcaggcttggcaggtgcctttacctattcagctatttcaccagccttatgtttttattttcctgtatttatttatttatttgtttttgtttttggagacagggtttctctgtggctttggaggctgttctggaactaggtcttgtagaccaagctggtctcaaactcagagatctgccagcctctacctcccgggtgctgtgattaaaggcgtgcactgccaccagccttatttttatgtgaaggttaattgagtggtagcattaagaatgagaagtatttatgcaatagaaatgtagaatttggtgatggggattgaatcaaagcccttagcttgaactcttctttagccacatctctatgtcttatatattactttattttattttactttttgactacatgactttactcatgtagccctgactggcctttgactcacagagctttgctagcccctgatacccaagttctgggattaaatgtatcatacctggccttatatgatactttaataatgtcacatagaacatgttatgtggggaaatacattcagaaagaggtggagattatgggaagggatatggtaaatttaaatgtactgcaaaggaagcctcactgggagctcatgtgagttaagtagcagctagagtgaagagagttaatgatgccaaaatctcttgtcaggttattttttttttatgtgcaaccatttaagccagtatgaatatgaaaaatgaaaaacagtagtctttgcttgcctctttctgggtagtaccttttttaaaaaaatttttttttaatttgaattagaaagattttcatgtcaatcccagttctttcccctcccctcttcccctgccccccccaactaataccctacctatcccaaatcctttctgctccccagggagggtgagggcttccgtagggggtcttcagagtctgtcatatcctttgggatactgcctgggggcaggggtctaggctcagggagtatccctcccaaagtccattcctatgctagggataagtactgatccactacaaggggccccatagatttccgaggtctcctcactgacacccacattcaggggttctggatcagttccatgctggtttcccagctgtcagtctggggaccaagagctnnnnnnnnnnnnnnnnnnnnnnnnnnnnnagacccgagctaacatggggttagctcgttaaacaacaataaagcctcatgcagtttgcatcaagtttctgcctccgcatggtgattggggtggccgctgttctgggctgagatcctggaggcctgagcttctgggggtcttgcaatataagtcagtcatcaatctcattatcggggaagagcatttaaggttgcttagattgttagttggtgtcatctttgtagctctccagacatttccctagtgcctgatttctctttaaacctataatgtctccctctatctgggtactaccttaaagaacctgtctctttgacattaccttttacaatgacactgcgtgtgtgcctgtgtttgctacgtgatattactgatttaaacacttttacagcctttaattaagaaataaattttgtgatgtgtaacatcgttgcataatgcgtgtttgttttgttcttactgtttaaaaaaatgtattttagataagggcacatccatgcagagaaagtaaaattactatgttatctattggatgtcttgttgctctatatgtagaccaggctggcctcacagagatcctgtttctatcccgagtgccgtcattaaaggcatgttccaccatgtccagcaccgtcttattttaatttaatttgtatatctgtgatatctggcatgtgttgccattcattttttttgtggacaccccccacctctctccgccctttgagactaagtctcactatgttatccaactggccttgaacttacgattctctttgttccaccatcctaatgatgaaagtgtttggtcttatgcttccagttttgtggtactttgtacttttttttttttttttttttaaagtatacagtattctgcctgcatgtgtccttcaggccagaagagggcaccagatcttattcaaggtggttgtgagccaccatgtggttgccgggaattgaactcaggacctttggaacaacagccagtgctcctaacctctgagccatccatctctccagccccttttcctagtttctaaatgttgtttacatcctaacctgctgttggagacacagtctcccttgtagaccaggctggccttcaacttgtgtgatcagaggagagtgcaaccatgcttcacatttttaactttttggtcattatgtgtttggttttgttaagtttaagtgcctgagaagtttggtacaaaggtttggaaatgaaaagttggcatttctgctttttcctctttagtcaagggtgaggagaatggaattgatagcaaccaaggagacaaaccttcagagcgaggcaagaggggccgaggcagaggtaagggagaatgatccaaatagaatgctgggcacgttattgttttgttttgttgtttgtttttttttttttttaattttactttggttctgttattttggtgttgaagattgagcccagtgcctatcctggataagaatgtgctccgctgctgagctacactccagaccctggcatcctattgcttattgcctcttggattctgaaaaccacttttatagtcaggtgtggtgggagtcaggcaggggctggagagttctagtatacatagactgtcaacaaagcaagaacagcttattctttattttgggcttttgtggagttttgcttgtttgtttttgttgtttctagacagggtttctctgtccacccctggctgtcctggatatgtagaccaggcttgaactcagatacacctgtctctgcccctccctctcaggttctgggattaaaccaccactgggcaatatttatttacaatgttttatgtgtatggatattttgcctgcatatatgtccatgtgctatgtgtatgcaggcctgtggatcccagaagagggctatggatgttcctggggactggtgtacagtggttgtgagctgccatgtgggagctggggatggaacacaggtcctttgaccagtgcccctaaccactggacccctctgtctagcacttgtcatttttactttttggtttttcgagactgggtttctctgtattaattgttctggctgtcctggaactcactgtttagagcagactggccttgaacttactgatctgcctgcctctatgtggattaaagtgccaacaataaaggggtgtttttgttttgttttgttttttaaagagtctcatactatagtctaggttggtttggaagtcactatgtagcccagattggcctgaaactctgcttgattaaatcattcaacaatatatacatatacaaatactactgtattccacaattgtgttttctaaaggatttggacgtggcagaggcagaggggcaggaaggttctctgctcaaagcatggggtaagtcacagccatcctattgttgtagttatttcctagttattctacttttctctccctccgacctgtctacaacttattgatcacacttagagcattaatgttgccagagatattaagtcagggttctaacctttgcactgctggcagttttacttggataatgctttattgggatgatagatttcctgcacaacctttcagtataacccctcacctccatgaagtcattaaaatgtctgcagacaactgccaaatgtcccctagggtagggatcaggcatatgtgcataattatcctgagttgccgagttgaaagccagctaaatccagccattgtacacaaaatatgttcttgtaaaaataatacttttatcctgagtgatagtagtaaaggctgactgttctaagtaggtgttacaattgactactattgtttctaggtttactctttctccttgtttttttgtgtgtggcaagacaactcagatattgagccctaaactttaaattggtagcttttatgtttacttcaaattcttctgtgtatattggaacattggtacttattttgttcttcgttaatcacctgatcatgatgccttggggatgttctgttagaacataattattttttacatttttatgtgtatatactgacatatatgctgtgtatttgtgaacatatgcatggcgtccgtatggagtcagaggataacttttgaaagtcatcctgtccttccaccatttgtgtcccataatagaatttagcttgccagtcttggcagctggtgccatctcaccagcccttcagttaggattgtttttgtttttttaaaccaaggcttttctttttttttttttctttaagatttttatttattatgtaaacaacattctgcttccatgtatatctgcacaccagaagagggcaccagatctcataacagatggttgggagccaccatgtggttgctgggaattgaactcaggacctctggaagagcagtcagtgctcttaacttctgagccatctctccagccccttcagttaggattgtcatgcaaatatagagaagtgatgaacaaaacatagctatagctgtacacgaagaagaatataattccattcaaagctaggttgggggtattggtgaaatggttcagtggttttcttggagaggccttgtgtttggttctagtaccccggtaccacattgtgcctcacaaccctttgaaccctagtttcaggggatctgatgcactcttctggcctccatgggcagggagcatgcgcatggtgcatatatgtgcatgtaggtgaaacacttgtacacataaaataaaaatgatggcacagacccatccttaatcctcagcacaccaaggcataggcagacagatctaagtctgtaagttcaaagtccccttagtctacatagcaagttctgggacagccacgtgacattgagagaccttatttcagaaaactgacctccccaaataaacctgccaagcttagagtccgacacaaggaaaaagagatgtattaactgttgatattactgctcattggagtttttttgtttttgtttttgttttttaaccattctaagaggtttattagtaaagagtgggaaatggagaggagggagtaggtacaggcctgtctggaagaaatacagggagagagagaaattggacggtttttaaaagatgatttttgtgtgagccttgagtattttatttgtgtaccatgtgcaggaaggtgcctgtgagacctgaagatgttttcctaggtactggagttcgcaggtcaatttgagttgttatgtgggtgctgggtattgaacctgctgccaagtcctacaaggagcagcaagtgcttttaaccactgagccatctctctaacaccttccttgacaatttttttcctggtgttctttcttggctggaaaagcttccaggtctcctaacttcttaggatgccaaggatcaaactgttgaaacctgagagccatttctacaggagtagatatagggtccagaagtagccatttctttgttagaagatatgcatgcttggctggagatgtagttggtttagtgccttcccagaaagccctgggttcagtccccatcatatcataaagctggacatgctggtacaaacttgtatttttatgaggtatccaccaaagaagattactcagacatgtgttcaagccaacagaaagtctttattagctagccagcaactactctaggtatttgagacaccttgcagccctgcgccttttcttaggttgagcttttttaagcataaaaaaacacatcctctcttggcatacatcagttagccagaagtggaaccacagaaagccaaaatcaaggtttgatggattagatcttattcttgttttggcaggtgttgcctatgtgctgggttccaaggcttgaatggtacttctattatggtatcatttgttttaaggtctgggggcctgttaacagtatcagaagttcaaggttgtcctcaattacagagtgagtttataggcaacctgggatacatgaggcagattctgtcttcaaaaatgataaaaaggagtggagcctcatgtctttagtcctactacttaggaggcagaggtaggttgagtcttgccagcactacatatccatagtgagaccctgtctcagaaacaaaattaaaacattcacatcattgggcctaacaggtaaaggtgcttgttgctaagacttgtgactaagtcctgtctctgagacccttatggtggaaggaaagaacctgctccccataagtatgcgatagcatgtgtgtgtgcccacacactaaataacagataaaaaaatctgtatcaggctgtttgtgttggcataagcctttaattccagcatttgagaggtaggcagatttctgtgagttcaaggctaccctagtttacttactcagttccaggacagccaaggctacattacaagactgtctcaaaacaaacaaaatcttcattataggggttggagagatggtttagcagttaaaaccactggttgcttatccagaggtacctgggtttgattcccagcacccaccagcagcagctcataaacatctgtaactctattttacagaagtcctggcctcttctgatttaaatgaaatccccattttctggcctctcagggcacttcaagtaggtggtgcatagataaaacacccatacacataaagttaaaaaaaaaaaaagtgtttaaagaagcaacatcacaatggcttaaaagttagctgtcatcaatcaaatggtaggagggagaagccttttacagcagccctttgaaggaacttgagcttatttggtttggatttttttttttttttcctctttttgtttttagagacagagcctttcaatgtttctttggctgtcctgatgcttacttttgcctccccagtgctgaactaaaggtttttcgagacagggtttctctgtgtaacagccctggctgtcctggaactcgctctggagaccaggctggccttgaacttctagagactcacctgcctttgtctcctaagtgctgggattaaaggagtgtgccaccaatgcccatcaaaatttttttgtatgggaaattttgtacacagtgtttattttgtgattttgatgcttgctttagttgcctgtttgtttacttcaaaccccaggacatttaaccctgcagactattcagagtccgcatctacagatatcaatgggacaaagtcgggggtttgtgctcagaatggtacagatgagggcactggtaagtgttttgatttgtctgaagtctttgttttgttctatgtctgttcttgagaaatgatctcactatatagcctgagttggctttgaactttcgtggtcctcctgtctcatattcttgaactctgggatttcaagacttaacgatctaacctgtcttcaaagactttttttgagagagagagagacagagacagactgactgactgactgactgtgagtttaggtgcctgtagaggagagaagagggtgccacattcctcgaatttctgggaattgaatgcaggtcctctggaagaacaaacatccttaactgccgctagagatggttttaaaatgttttgttttatttgagtatgatggggcatgacctgtctgaagttcctgaatccaagttgggtatatgtgcttaaccactgagccatctctctagtcctgcctttactttaaaaatgtgatgaagtcctgttttctacctgactttgaaccttcttatcttcttatctcagctgctgaagtgctagaatcaggtgtgtgcaaccactttcagctaggagaagagtttaggattttttatgtttattggtgtttttcatgcatgtatgtttgtgggaccacacttgtcagtgcttgagtaggccagccattggatcccctggacaggtgttggtacactgacatttaggagcttgggattgtactcaggtcttccagaagaacaggaactactcttaactgtagagccatctttcagtccttaggagaaaattttactgaaagtgcttagtattctgggtggtaactgttaaaaccttaaaaaaaaaaatgcgtgcgggctttatctatctatctatctatctatctatctatctatctatctatttattggggggcagttactctgtataacagtcctggatgacctggagacccacctgcctctactcgagtgtgccagcagtgactagctatttatttattttggtgtttttgagatagggtttctctgtgtagcccttgcgctgtcctggaacttgctctgtagaccaggctgtcttagagctcagaccgacttgcttctgcttcttgagtagctgggattaaaggcatgtgccaccatgctcagctttttgtattgttttctgaaatatgtaagtaaatagttgttactgtttgtttacctggagatcttctggagatgagtttgtggtagtcttaactactgaagctatgtttatataaaaatataatttatgcaaaaattagccactaatgacccaaaataaggaataccaaactaattcttcctccacacctggaactttagttgagggctataattctcctggtaacatttggacagtttcatagagctcttgcagcagcacttccatgttttcctgctccaatctggtttatgtggtactgggattgaacccagtctttgcacctgtgaggcagacaatccaccaactgaggtacattcccattcccaaacagaacatggaaagcaattgtaataacctcataaaatgtgatgcgcagttgtttgtcgtacctaatgcctcttaacagtatttaagaagctgatacaggaggattatgtaaattctaggccaacctgggctgtagtaagatcttgtctcaaaaatcacatcaaacaaacaggaaatatccaatgctaagtaataaatctaatggtaacaacagattaacaaacttgtatctagaaaaatacttttaaaacaggtaaaattggaagtgacattatggactttaaaaaaaaagaaaaacttatgtaactgggcagtggtggtgcacacctttaatctcagcactcaagagtcagaggcagggagatctcttgagttcgaggccagcctggtctacaaagctacacagagaaaccctgcctttaaaaaaaagaaaagaaaaaaacccttatgtttgtgaatatttttccttgtatgtctgtgcatcattgcatgcctggtgcccacagaggtcaggtgagggcattggcccactggtactggagtcgcagctggttgtgagcaccaggtgggtacttagcattgaatcgacatcctctacaggaacaagtgcttttaactacggcatgaattttccagatctaaagaacattttttaaatcctgttataaatttgaatttttaactggctcccatctttgcatttagtaatctatagtgatccttcttgtaaatgtctagtatctttaacaagttgaattgaaaaatatgatttattgaactgggcatggtagcacacacctttaatctcagcacttgggaggcagaggcagaaagatctctaagttcaagagcagccagggcttgaaataccatatcaagagcagactccccccccaaaaaaaatcagatttatatagttcagttggtagaatgcttacacagaacccttagtttgatactagtattgtttaatctgggctgggcatagtggtatatgcctagaatcccactacttagatacaggcaggaagatcaagttcaaagttatgctaggctgcacagcaaattgaaggtgagcctggtcatgagacactgactcaagaacagatttattagtaagtaatttatttgtttttgaggggaggcacagtattttttaagtgttattttgagggtcttactctacagtcaggctagcctgaatgtagtgcaggctggcctggagctcatggagattctcctgcctcaactcctttagccctggatttatcattttcagctttattatttatcttactaacttgtttgcatgtatgtgtgtgagcaaatgggtgtattcatggagatgaaggagagcatgtgagtccattctgttcaccaagtggatactggtgattgaactcagggttataaaccttgacagcaagaacctttacctgctgagccatcttgctgacccattgagatctaatttacatacaatttctacaggcagaataagttgaattctaacatgcatacagaattgtaaccataattaaaattgagatggtgtttttctagtagcaataaataattacaaataaactaaaaatggatcataatttaaaagcttgtagcatcttttgtggctggggatgtagctcagaggtagggcacttctttccatgtgcaaggcccagggatgtatccctagtattgaagaagtaaaatgtacataatgtatgtgaaagatttgtttgtggagaaattcaacacagtttctaccaaaaggggcaacatgtttagtgttctggagttggagatatcattattgctgcaacctggttttctcctcaggatgataggtattgataggtagcttcagaatagattctacttcacatcttagcagtcttctgccttcatcctaaaaacacaatggaagagtatttacagtaagccaagcaattgtgatgaaacaaccaagaactcaagaacttaatctcaaattatagtaataggcagcatggaactagcagaagtgtatatggagagttgacaatgtacctagcggggatcatgagtcttctgtctagctgactagagcaaaaattttacaattcagggttgttcactacagtgaatacagcagagcaacggtccaagtgaggcttacatgtattcacaaagaaggcaggaatgaatattacttcaggataggcaaagataatctcagtaagcatgagtcattaagtgtgtgtgtgtgtgtgtgtgtgtgtgtgtgtgtgtgtgtggtgtggattcttgtgcccatgtgtataactctagaaaccagaactgggcagggcaccatgtgtcttttattgctctctaacttttattgctctctaccttcatgagtgggtatgaagaggtcagaagactttctaccagtaggttccaggaatgaactcaggacatcaggcttaacagcaagcacctttactttcttagccattttgctggctccaatagtttgatttgtaaatcaggcatagtaagacatttaacagttagaacttactaaatgaagtaaaaactataagtgttatatgaatgttcttgatgttttgttcctagaattttccatttaatgtttttgggccgtgggctctccctgaaggggactgctgtgtgatacattaactttatttcaagtgctgactttctcttgtttccatcattaaaagctttccttttgatccacagaagggatgggaaagcctcacagtatatctcaggagctgccaaataaaaggtcttatggactcaaaggtatgatggatgttttgttttgaaattttgcgtagataagaatccttcagaaccaagtatgccatccattggtagagtggtcccccagggtacttgagatcccaggtttgaccccagcactgcataaagtaggtgtggtaccgagtacaggtagtgcaaagtttgaggctagactcaaaagaagaaacctgtgagccagtcaagtaatgctaaaggcatgagttcccaatcctgatgagtttaatcctggggacccatagatggagagaattaacctttacaaattgtcccctgacctccacattcatgctgtgacacctataacccatcctactcccaccacaaaataaataaaactaataaaattttgaaaacttaaagttgctccattcctatacaaagtaacgggtttcagactgagtgtagtgctgcactctttgaatctcagcactctgaaggcagaggcagatagatttctgagttcaaggccagcctagtctacagagggagttccaggacagccaaagctgtgtgataagaccctgtctcagaaaactaaaacagaaagaaagggaggggaagaaggagtgtgagggagggaggaaaggaggaaggaaggagattcattgtgtcatttttatagaacaactgtgtatttactttgttcttacttatctcttccctatggctctaccttatactccttgcttctgggcttttagtttttgacctgggactgaagccagagcattgcatatactgtgcaaatacctcaccagtgaactataatcttagttagctcaaccatactgtttgaaactgaaaataatgttatcaaagttatcccatgtgttttggggtataggaccatagataggaaattgaatcatttgtatgaaattcttactgtgaagtttgaatgttctagaattaagagtctgagctcagtccagctgtggtagattctagcactcaagaggtctgtgagttttgaggccaacttagtctacaaagcgagttccagagccgttacacagagaacccttgtctcaaaaaactggggggaaaaaaagagtctgagttcacctatttccatagcatttttatactacagtgtgtatggcaggctattgcagcatgtgcctctggctttcctatgcttttcttcacacatcaattcatggtgctacatctttcctacctacaactatcattatgcatgatgtcttcctgcttagaaacaaactcattttctcacctgattatgcacagcttctttgtgttaattttaaaattatttccctgctcctctggacttagaacaggatgacagttacagtaatgacattgtgtgaacttggttggaaattgtgtaatgtagcaattatttttttttaccttgcttcctatatctgataatcgctaaagtcactggtacaggttttcattacaaaggtgttctaattatatgttcatgtgggtatatatgcacaaatacacatgcatgcggaggctgaaatcaaatttgggtgtcatttcttaggagccatgcctgttgtgttttgagatgggctctctcacttaggttggggccttcagtagtctaaactggcctgcctgtgagcctcagggattttcctgtcatcacctctcaaagatcaaacatgtatctgcctgtttccgaacaccaactttggcttgatcatgctcagcttttacatgagttactggaaattcaagctctgttctccatgctccattctctagtactcgtcttacctgttcccatagcccttgaattcctccccccgcttttttttaacattatgcgttctgagaattgatctcaagttcttatacttccacagtgagcacttcattgactgctaactcactaactcctatagtttattattatttttattttatgtatttatttacttattttttagggggtttctaggcagggtttctctgtggctttggaggctgtcctagaactagttcttgtagaccaggctggtctggaactcacagagatccgcctgcctctgcctcctgagtgctgggattacagacatgtgccaccacctccctgtttaatttattattattttattattattattccagtattgagaaattaaaccttgtgcatgctagacaagcactgtatggttaagctgtaacctgccctaatgatccattttattcttttttttttatttatttgtttattagtatgcttgcattttcttacagcagaattgctaaaatatttcttaaagtgcagtttgaggcattaattttattttagtgtatatagttctgggtatttttatagagaattcattttttatttttattaagaatagatttaaggaaataatttttcttggattggtaattactaattactaattagttgaattagtaattagttgaattagtaaaattactaatgagttgaattatttttcttgcataatacacaaactcattagtgttgaagtttctttccagctaggtcactttgctgtttttcagccccaaataagtacacagagatatattaatcatcaaactgttggccgatggctagggcttcttaaaactatgtatgtatctatgtatctctacatggctttatcttaccagagaacacttggcacgtcctatcttcccagtctctacatggcgtctacttcctctctctccttctcatgcctatacttcctgcctggccaatcagtgttttattcatcaaccaataagaaaaacatatatacagaaggacatcccccatcacattagtagtatggttgactgtactggacctttttttattccctgtcaggtgcctggaaaaattctgtggaagaatggacaacagaagattggactgaagacgtaagtgttcattcagacctttcttcctcctgctatgtcttagcatctctcagaaaaagcccagtgccatttatcttgtctaacctgctgctactgctactacgcttctttcccctcctcccccctcctcttctgcctctgtcccttgttctcaaagagttgccttttcaacacatggttctcaggttttttttattgttgtttgtttctttgttgatgttatatgtgggcctgaatgtcctggaattctagaccagactgatcaaactcatggagatccttctgcctctgcctctcaagtgaactctgaaatgttgaagctgctcacctaagtcataatttaaacactctgtaactccccccacttgccccctatgcgtttcactgtgtggccctgggtgtcttggaacttgctttatagaccaggctggccacttgcctctgcctcctgagtgctgtgattaaaggcttaagatactggctgttttttaaaatcttttatttggtggtggtgaaagaaccgagcattcaagtgttaggtcaagggcaaacttggtaattgctgtctcaggcacacatgtgcaggcaaatattcaaataaaataaaaaatgaatctaaagataataagcccgtggctttcaaataaagattactaatcaatgaaagagaaaagacatttttctttggagaaaaaaaatcatcaaacttttcaaagtttcctgcttttttagcacattcattgatcagtggtgtttcaagtggagtactaactaatacttgaaggttggccccctttgtgttaagttgttccttcacgtctactgatgtagttgcctttcttggggagggttagttacttggtggtttttgtatgagtcatttcctttagacaccctctaggtgataagaacactgctgcctgaaaagggctccagtcaaatatgctttgcatatgtattgtacagacaaaagtaaagttttttctgttgaactttccatacagctttctgaaaccaaagttttcactgcctcgtctgttccagcagagaaccacatcacccctgggcaaaggtaaagggtttttgtgtttttctttttatcttctttttcattcgaagcataattgaaactttgttttagggcaactatttccatcttttattctactcttacagtttctgttttattcctctaattagcctttatttccccttattgcagcactcataacttcattcacatgttatcagtcgtgtccaatgattattgaatgacacttgttcttgggatatgttagcagttggccagagagtatactaaacctagttataattcatagttactcttttaataaagttttgattttgcccttgaatttggggtcttactttgtagcccaggctggtctagagcttagagatcttcctgcctctgcctctggagttctggatgtatatcactattcccgcctaaaacagtttaaagactaaactttagtaccttatattctttagtttcttcatgcatttgtttagatggtctctaacctaattcaaacttgccattttaaatggacatgttattataatgtgccaaattccagcaaaagaaggcctttgaggttaaaattatttgtgtgtgtgtgtgtgtgcgcgtgtgcgtgcgtgcagttgtgtagaggctgtgttgtccttcagaagggctgtctaccctggggggaaaaaacattgttttacatttatgtatttttatgtgtctgagcttgcatgtattttggtgcaagagcatcatgcccatgtgccatagcacttttgtgtacgaggacatttccataggcttacagacgtggttcaccatggtaattctaaacacctttgataatggtgataagggtctgtgtgactggctcctgcagcttgttctctgaccttaatataagcatgcaaacacatatgtgcacacatgctctaaaggtatttaattttaaaattaaaaacattttaaatgctaaaaagtttaaagcctagatatgtgtgtatatatatatctttaagaagtacaagagagctgggcagtggtggctcatgcctttaatcccagcccacctttaatcccagcactcaggaagcagaggcaggtggatctctgtgagttcgagaccagcctggtctacaagagctagttccaggatagcctccaaagcaatacagtgaaaccctaaccaaaaaacaaaaaacaaaacaaaacaaaaaaggaagccctgaatcttcttctcaaaaccaagctaaatgagacagggctttattataggagagaaaaagttcatagatcttcgttgagtttataactaagtgaaaaatagctaatttactggtggtactttaatttctcaaaaaaaaaaaataataattgagagctggagaggtggatcagtgggtaagagcacccaggttagattctatcactaacatgtctggtcatcggtctccatacttccaattccaagggatctgctaccctcttctgatctccatgggtgccaggcataaacatggcacacagatacatatacatagaaatgaaacactcatatgtaaaataaatgaatatgagaaaaagataattgagttaggcatgatgttgaatgtctttaattttaatattcaggatggggaggtagaaggatcaggagttttaagcaaggctcacatataaagtaaacgggaagctaaccttgactacctgaaaccttatgtttcaggtggtagtgcatgcacacctttcattccaccacttagaaagtagagaccagaggatctctgtgagtttgagaccagcttgatctataaagcgagttccaagatagccagagctgtaaccagagaaaccctctcttaaaaaatgtaccaaacaaaaatcccaaccaaaatcgcataaataaaaaatgcttaaaacaaacaaaaagaagccgtcgtcttcacaaattttcaacacagctaatcagatggcaccagggactgcaaactccactgctgccagtgacgattatccttagccactcacttttatttcagtgcgatgtgtgtttgagtttgtttgtttgtttgtttgtgtttgcgtttgttttattccagtgcgatgtgtgtttgcatttctttgtttgtaataataggtcctcactttgtaaccctctggctgtgttggaacctatgtatgcaaggttggccttgaactcaaagatccaactgcatcagcctctcaattgctgggattaaaggtgtggctcaccaagtgtaatgtacttcattcagtatggggtcttcaggagtacgcccattagcaagtcatgaagaatttattgctcataaattcttgcagtaatagctggaagtagaagacggtctttatccaggaaacaatgatgtgatggtttccaagcacatatctgatgattctgtgtggagctcagctactgagtttcctgggccgagatcaaacttctttactcatcagtgagcaataactggaatgaaagatttcttcttattcattgtgtgtatgtgcattttattttcattttgggttgtaggtgtgatgtgccaccacacatgagtggaggtcaaaggagagtttttgagccttgcttgtctccttccaccatgtgggtccctgcagttgaaatcaagtttgtcaggctttggtggcaggtatctttacttgatctctaagccatctcactggtcaaaaacctgaactttttgtagttcttttatttatttttgagacaggttctctctacacagtctggctgtccagaaagtaactgtagaccagagagctgcctgcctctgtctcgtgagtgtaaagggtgtgtgtcaccacaccaggctgtagtgctttcccagaaaaccctccagtactgtttctcacttgagtcttactaaccttttgaaatagaatttgctttgattctggtggtgttgcaagttttattattagcactatatgtgctaatatataatacaaatagcacaactatttgtatcactggaattggaatatcatacattagaacaccaacttaggttttagattattagcctcaaaattgaaattggtttcaggatagtaaaaatggttctgtataaggaacttgggctaggatcttcctctgtatgatttaactactcagaccctgtctcactggcatgatgagagtttcagttaagagttgttaggagtaagcctttgaaaggactcatggagtaccattcctgggtaaaccttttacagctcccacttaactgggtaagtcattcatgttgtacacagcatttatcccaaacttcattcttcctgaggccatcaaattggaatatttggtgggcttttgggcagggtaataggggcattataagatcttcgttgaactgggcagtatggttttccattcctttacaggcagatttgggagttcgaggccaacctgttgtacagagcaagttctaggccagggtggtggtggcgcaacctttggtccaagcacttggaaggcagaggcaggcagatctctgtgagttcgagaccagcctggtctacaagagctagttccaggacagcctccaaagccacagagaaaccctgtttcgaacacctcctctcccccacccccaccaaacaaaagaaaaaagacttaagcttctactatggttggatgtgatgttttaacaatattgaatcactctgtttcaagaatattgaagcctgggggtggtgccacacacttttaatcctagcactaaggaggcagaggcagggtgaactcttgagttagaggccagccagatatacatagtgatactctgtctcaaagcaaacaaaaaccaaaaagttgaaaggaaaagataatcatgaacccaagtaatggtgtctttaagagccattgcagctcctctggggatatcatcggaatttctcagtgcccatttctaagtcggttcactcactggctttgtaacctgtttggtgactactcagcttctcttttattttctctgaaactccatttccccatggttttccttattcaatctctggcttaaatttcctttatattgatgtgctccccagtttgctggctggtgccacttgctcatgacagctgattgctcgtttgtctctcatctgcttagcattgacctggtggccttgctccagaagcctgtccctcccactcaagccgcagaagccaactcctttgaaacatcccagcagcagggctttggccaagcacttgtcttcacaaattctcaacacagcaatcagacggcacaagggtctggcagctccacttctgccaactcctattctcctcagagactggtaactcacttttatttcaagttggggtcttcaggaatgtgcccattagccacagtcatgaagaatgtatggctcttaccttgcagttatttcctcatgtaaaatgctggcagtagatctttgtccaggaaacaatgatgtgatggtttccaagcacatatctgatgattccgtgtagagctgagctactgagtttcctgggccaagatcagaactcctttatgagtcctggtcagtgagtgataactgggatgaaggtatccttagtaatgattttgttttttaaagattttatttattattatgtatacaacattctgcttccatgtatatttgcacaccagaagagggcaccagatggttgtgagccaccatgtggttgctgggaattgaactcaggaaccctggaaagccagtccgtgctcttaacctctgagccatttctccagcaccttagtaatgatttttaaacttcctgtttgttgtgggtgtgcctgcaggtatgcctgcacaccatgacccacttcaagaggtcagagacaacttgtaaaagtcagttctcactctccactctgtgggccatcttgtcagcccaactgattattttcccctggttttgtttgaaaatatgtttctgtatttagtatgttttaaaatttttgtttgcaaattgaataaaaagcagatgtttgtcttgtctgtccaggtgttcctactttgcacttttcttctattccataaaatatactcctttttcagctggacgttggtggtgcatgcctttagtcccagcacttgggaggcagaggcaggcagatctctgtgagttcgagaccagccaggtctacaagagctagttccaggacagcctccaaagccacagagaaaccctgtcttgaaaaacaaaaacaaacaaacaaaaattacactcctttttcttaaattgtcaagtattatatgacagagtccctttcgatatgttttccttgaaataatgtcacccgctgttaggcaggcacagtgactgttacttctgagtgccttcacagtgagttcccatcaggaagaattctgggattggtagtgaataagactgacaggtggggcaacaagcttggagtgtcaccagtgaaggaatttagtacaggaagacagctgaagtctgttgtaatgcaaagtaaatacagagaatctgccagtgtgctttcctctgcttttccatttgctaatgacatatttctgacatctatagtttctgtttggtcacggaggtcacagatgaagctggaccacactttagtgagagcaagttagtattaaattagggttgtggctctaaacgttactactatttataacccctggtgaaattaagtaacaatttaacaataataatatagtaaaaatgggttaacataagacagaatgaatcagaatctgtggtattattaggacttggactctgtacatatgctcatttgtgtcttactggttcagttaagtaggtgaaattgaaactatactaagtgttacagagagcaaatcagtggctgttgagaaaaagagtatttggtaatagtagctgctgggtggatggtggatgctgtgtcagtgagactagtgcttgagaaagatgggtttgagtggggcctcgatggcaaagtaacatttgcacaaatgcactaagaggtcagactgtgaaagatgggcctcagcagcccatgacctagtgtgttttgctcacagtggagagctctgaattttctaactaagctattccacatcttagaatactgataatagccaggcatgatggtgcacaccttttaatcccagtaccagagaggcagaggcagtcagtgagtttgaggacagcctggtctatagagagaattccaggacagccagggctacacagaggaaccctgtcacaaaaccaaagaatattgataataaaccaaagaatattgataatatccatcccctctggaggaggggatcattagtttttttgtttttttgtttttttgttttttttgttttttttttttggtttgtttttggttttttttgttgttgttgttgttgttttctttccctttcttgtggagaatgattggtgttcctagtcatctgaacaacctgagcacagtactgttggcatttactctgcttcctgcgtgtctcagtgtctgttattaactatgagcttttgatgtctacttcaatttaatgtttcaggaagcactcagcactgacctctgctgttcctgtcattagagataattactgtttgcagtttaggaaaagtttgtgttttggtctatcaagcatatttttgtcattagttgtttgtttcttaaaagtttattttatggttggagagaaggcccagcagataaaagcagttactgctcttgcagaggatccaagtttgattcccagcacccatgaattaaaaataataaattagtactaataaataaaataattatttttttaagaagactgtaataaatgcttttgtcctcttaacctcacatcaggaccagggaggaatgctgcatagtctagtactgttttttaaagcaaggtttgcttgttcagatgatccaagatgcagtgttcttacttctgaagaccactgtgtttgcaagcctgaagggaaagaaagctaagagcttgtgctgtttctgtgtctttacagtcatctgtcctgggctcagggtttggagaattggccccatcaaagatggtgaatatctccagctcccagattttggacaagttgaaagcaccaagtttgaattcgtttgctgccacttcaactgcaccgcagagcagtacaagtccaccagccactactgcttcttgggatctaaagccctcagcatcccagtcctcggtcctcaatcattttggtaagtatatgttttctgagctggtttattgtactgagtcagttagcagggcatgttttatgtgaacagtatggtggaacaactaaattaattgtctcattgtacagtgcctccatttgtttattgtacacaattcacaggaatatatagcttcctagctagaagagaagagcaaaaatgctgcatggtaattaatgcctggaattccaacacccaggagttggagggaggaggatcaccataagcttgagaccaacttagtatagagtaagaacctgttgcaaaagccaagcaacagcctctttgggctggcttgttacatgcctttgatcatcatcagtttgagcccagttgctctgcatttcaggactatactttcaaaaaaaaaaatgtcatgcccccccccaacaaaaacaacaacaacaacaacaacaaaaaaacagctggaaaaccaagcaattgggactagagaagtgaattatcgagtcctggttgatctttcagaggacctagcttggaacccaccatccacatgaccacaaaaccttatgtagctccagtttcaggtattctggtgcctttttctaaccttcatgggtacatccacatgatacacagatatgcttgtaggtaaacacctatgcacataaaaagtgtaattactgggttggagagatggctcagaggttaagagcactgactcctcttcataggacccgagttcaatttccaacacctacatggtagctcacaaccatctgtaatgaggtctggtgccctcttctggcatgcaagcatacattcagatagaacattgaataaataataaataaataaataaaacctttaaaaacaagtataataaattaagcaagtagttgctcaaatgaaaagacaaaaggtaagtgaatgcatggtaggggaatctaagtggtagtttgcaactcttaaatacagacatagatagcacttttgagttcttaatgtggaaagtcagtgaaatcactttctcagggttttggggtgcagctcagaagtagagtgtttggctgctgagtgaagccctgggttttaaccacacactacaaaggaaaagaaagtccacaagagctatgatgcacccccattctgccattttgctgtatccatcatgatttggtcaagctttatttttccattgtaaagggagcatgcatatacttgatgttttagtcctgtttcccagctatactcctgtgaatgcttgtgtgagggaatagtccgggttggtagaggggggatttttacatggttgcttttatgcttatcatcatcaataggcagaattctctgcttcctgaaatgacttgccatgctcaaagtaatctttgtgaaggctattaattacttcaactctattggaagctggattcataggcactctgcctgacagagagcattaattacagatttgctgaaagaaaacagatgttgagcatgaaccagggtgtttgtatagacattctaaacacaacaggcactcttattagttcatgtgttgacacttggtgcctaccatatagaaacattgatgttgaatctaaccaacattcaaacacactattcagataatagatataagcttctgctgttagcgtcctcccataatttataagtaagtttatgaataaaagtaggttgtttccatgttctctgtgaagcctgtgttttttgctacctgtctcattgtaattgaacatgaacttacttaaataagatgtgctgtttttattttattattttaaacagtgctatgttgcccaggctggcttttaacttaacaatactcctgccttggcctctgttcttatgagattacaggcatgcatcctaacactcaggtacttggcatttctttactgttttctttttttgtttttcttttttttgttttgttttgtttttgttgtcaccccccccagggtttctttgtgtaaccctggctgttttggaacttgctctgtagaccaggctgtcctctaactcagaggtccacctgcctctgcctcccacatgctgggattaaaggtgtgcaccaccaccaccaccaccaccaccgccacctcctagcagtttgcatttcatttctatgatttctgtttcctgaaattagaagtgttttttgtgttttttgttttgttttttatttttatttttttaattacaattggaggtggacagtggtggttcatgcctttaatcttagcacttctgaggcagaggcaggcagataatttgaattcaaggccagcctggcctacaaagtgacttccaagacagcgaaggcagcacagagaaactgtgtctcaccaaaaaaaaaaaaaaaggtagaaagaaagaaagattgcaattggcatgttctaatagttgattttattgtatggagaaaagagtcgtgtgttcattcattaccatcttgtttttcatagctcatccatataatacgagtatgaaaaaatagactgtatatgctgagttcagtgccctaaaggtgagggaagatgctgtgtgtacattaaaatggagcagcctatgaaaagaaaatgaagatatataaattatgtctgtgtggttttgatagtcaagaacccaggtacaaagttgcttctctagagcaaaaatgagaacagcaatggaaagagttgtgtttgtcacacatgttccttatagttttatattacacataatatatagtaatcaaaatagtttttttagaggcatgtaccaaatcgatggctgtggagatggctcaatttgtaaatgcccactgtgtaaggaggaacatctgtctgtggctgttcacccacatcaacattgggtgcaatggcacacatctgtgatcctagcactgaggaggcctacagtttaattctggagctcactgcctcgatgaatgatgagttcctccaggtccagtgagagaccttgtctcaacaaaaaaaggtagaaaggcactctgggaagcaattagtgatgacccctgcctacacacagagaatacagaaaaattgaaaatataataagcatctacaataacaaacaggtgtgtgtaatacttccatagatatttctacttcatgtcccctcttcatgaaaaataaggaacaaactattcaggcaccaagtgtgtatttgttttcctgttcttccagcaccatactatttactcttttcaagtagatggttcagaacctagtagtaatagaagcctcctgaaactaaaggtatagaagtccaggtgtgttgcagaattactcattgccgcttaacttttccttccacatttcatagacttcaaatctcagcccgagccatccccagttcttagccagttgagccagcgacagcaacatcagaccccggcagtcagtgttcctcctcctggtttggagtcctttgcttcccaggcaaaacaccgagagtcaacacctggagatggtccttctgtcaacagacttttgcagcttcccaacatggctgttgaaaatattgtatctgcccaccaaccacagcccaaacacatgaaactccctaagcgccggatacctccagcatctaaggtaagcattccatgatgaattccatgccaaagggtttatttcacactaacgcaagtatcagaaaactgagtattagacattgggatacagtgccttcaaccatagctcatcatcatcgcttgggaggatttggccatttttcaggcactaggctaattattagagagagtgcagtcaggccgggagacagagcctcttagttcaagtacagacctgagggtctaattgaaaggaagcacttttgttattgtgttggtatctcacagtttggaggtgtgtgattacctgactagataataccttcatcactgctgtgtccctgaaaatagctgaatgtcctcatctactagctaccgttacatcccccaacaactctaaagctacttaatttataatattaacatggaccattcctctacaaaccaataagttgtttgctcgctttccctcactatttaaaaggttctgtttctccccctccctcccctttcccactgtttttgccattgcagcccatggaagccacttgcttgagcctgttgtaagccttaaggcctggagccctggcctctcttcctaacagctttgctttactaggttcccgcttccgcagtggaaatgcctggttctgcagatgtcacagggttaaatgttcagtttggagcactggaatttggatcagaaccatctctttctgattttggatcaacaacttcagccagtgaaaaaaataatcagatgcctatcagcttgtacccgaagtctttaaggtacaaacctcacattttagtttgacaggatatagtcctttctttgcaaagtaaaacaaaacagagtgtaagaaattggtgaagacaatctaataaaggttttgtgcagctctcaacatgtttagcttcacaaactctgctatgcactcctttttcttgctccttccctctgacaaagtgtgtgtcagaactgtctgatcaacatatgtcatgcaagctgaatcctgcaaaatgtggcttttgtatcccttagctttcatttaagctttcagaggtcatccatcatggcttctattgccatccatttcactgagcaaatgtggccgggtcatagttggtagacatataggctttttttctctctttatgggtggtgaatggtattgccgtgttacaatgtttcttgtagcccgataactgagttgtgtgataagcacctggctgtggtcgtactttacactcccccaggagtctacaaggacctagcttctgcacagctttccaacacttcagtgaaaccttttgcaagtagaaagatttgagatttttattagtaggtttttccatgtctagagggaaaacctgttaaattatagactgtagtgcagctttgtagttaatgtgatactgagctggcctggttagtgaagctgtcatatgccagtgtgtgcctaactaacatagtgtactctttccagtgaccctttgaatgcctctttaccaatgaccagtgctgtacagaactccacctacacaacttcagtcattacctcctccagtctgaccagctcgtccttgagctccactagtccagtaacaacgtcttcctcttatgaccagagttctgtacataccaggattgcataccaaagctctgctaacccaccggattcagctccaggctctgttgctgtaagtggttctcctgggtttcttttcttaggatgcacactttagccaattacactttaaaattaatttattagtcaggcaaacacctttaatcccagcattatgaggtagaggcaggtggatctctgaattcaaggccagcctagtctacagagtaggttccaggacagccatgactaaagagaaactatgtctccaaaatgtgatgggggaggggtggtaagacgtcaagagacaacttgtaggagttctctatctagtgttgagaggatctaacactgggtgtcagacttggcatctggtgtctttgctcatagagccatgttgcttgtccatcatagtgtttgagggaaaggaccttgcttttattaaagcaatgaatcaatgaatagtacttttctaccccactgtcacattctaaagtgacattaactacaaagctgcatgtatatagtttttgtttttgtcttttcttttcttttctttttttttttttttttttttttttttttgtgtgtgtgtgtgtgtgtgtgtgtgtgtgtgtgtgtgtgtgacaggatttctttgtgtaactgccctagctggtctggaactagctctgtaggcccctcccgccttagtctcatagagatccacctgcctctgcccctgctggggttaaaggtgttcaccaccacccggccagcctctagtaccagatgtacactaccagaagtgttgcctgtggaacactcatcaaatctaatcagaaaagcattggttattctcataagaggcttatcgttgttaaccagtgggttcttctagtctggattgttgtattcaaggtccatagctaagtaagacttgttttaggggccttggggaccctcctggccaagaactgtaggatagggtatccagcttccaggactggggtttttgtttactaagctattgcttctaagaatagcttgatgcatgagtactggaaatctccattcaaaaaaactgaagcatcattctattaagaatttgagggggactggagggatggctcagggcttagcactgactgttcttccagaggtcctgagttcaattcccagcaaccacatggtggctcacaaccatctgtaatgggatctggtgccctcttctggcaagcactgtatacatgataaataaataaatctttaaaaaaaaaagaatttgagagaaaaacaccagggcaaagcaaggtctagatcttggcagttgctggtcagcagatagagaagaatgagggagaggttggcaagcagctgtggataggaatctctagagaagtggtatgaagcccagcatgtctcaagctggctgtgatgggtctccccagaactgcaatgatagcctgtgagccaccatgtggatgctggccatcaaatacagactccctggaagagcagccagccccctttctgctgtgtcatcattctagtcctagttggacattttaatatagagtgcatcagcttttccctgttgttactttattctggagatggtgtcttagcctcgtgggctctgcttttgagtgcacattctgtggcttcctccccagcctgtgagggcaggtgccattttattgttttagtcagtcccaccacagtgtcttaggtggagtcaagccagttgacttaggttctacaatttgtggagagcatagtcacaacccactctgtcttaaggtcacagctcatcttttcttagaaatagtcctcaatgtgatgcttcctggtatggaagttactctttctttaaaaaggaggttgactttttttttttttaatttagaaacttacctttgcattacagaatttacatgtgaaatgggaagcctcacatgacttaattataatgagacttcatcttccttattcagtttaacaacctgatagctgttttagaagtggtttatcctcctgtgtctttgttacttccctgaattctgaatctgttttcaaaatgcccacttcttgcgatttattaaagttagttgtattttgtcttctttttattttcattttccttttatattagaaaaggaatgaaacagatacgggatggagatgttcggttgtaagagcctgtcctgctcttgcagccacctccggcacatgacacccacctggtacctgagtgacgtgcactcacatagatgatgcacatacacatgagtaaagtctttgaaaagaaataattctcctttgttaacctgtgcatatgggtgttatagtcccaattcagagttaccctggtgattgtctggaaatgtccatgtgttaactctctctctgttctttgtagaatggacatggtggtggccgaagtcagcatacagtagacagtaagtgttatattttcattacaactggtgaaaaccaactggggaaagagtggctaacataattcagaaaacaccaattgagcagtggttaattctccaaaatcagtacttgaccttttccctggaaacccctttttgtttgtttttgagattgtctcactagtagctctgattgacctagcttggcttgctatgtagaccatgctggcctcaaactcacaatacctttgcttgcctctgcttcctgagttcctgaattaaagatgtataccaccataccacacctcagagctactttttctgagggggtgttttagtcactgtgtatcccaggctgactttccagttactaagatgtgaagttatctggggatctcagtgtgcatgtaggaagctaccgtcttgagccattctcactctcccttcctgctccttttctaagggaacattctctgggagtcttttgtgaagtcacccttaggctgtggaagtgacctatatatagcatcttaatttggggtgagatgcttcaccagagtcttcatccagtttctttcagaaccaacttcattttcagaatcagacactagctgggtgttggtgacgcacatctttaatccagagcttgggaggcagagaaaggccggcagatctctgtgagttcgaggccagcctggtgtagagagcgagtactaggacaggctcccagagctacacagagaaaccctgtcttggggaaaaaaaaaacagaaccagactttaaaagtcttaggagtgtgaattcactgcaaacccacctcccccaaccctatcctttagtttcctagcaattatgcaaggattggcaccattcctctcctaatttccctatgtaacacaaggtatttcactccaaactggttgtcctttttgattttcaagtcagggtttctctgtgtagccctggctgtcctggaacccagagagccttgcctctgcctcccaagtgccaagactaaagttgtgtgccaccactgcctgacaaacccataaccacagtcctcttacaaaaccaaaacaaacaaaaaagactcaaaaagaaaaaacaaaaactacaccccattattaattctattccacacttacatattactcaaagataacctaatcatctttttcactatcctatcatatcatattagaggctgaaatggcttcaactagacccaactgggaaaaattaaagcctactcctccatttcccacacagagtgctgctcttccatacaatccaactcatactccttagcccaataattaatatcctaacaacttcagtattccctttgtttttactcattgatattacttccctctcacaaatatgaattaaaatacccattacactatttatagcctctacagtcctatgtctaatttatgtccccacactcactatcgttctagcaaccaacagtaaaatatttaatattagcttggtcaatagactacctccctagcctatatatagctctgagttcagtctctaggaccacatgcaatcaggagtgctggaaggcatgagaatcaaaaggtcatcagtgtggtggtatgtgtgaatgcttcaattccagcattcaagaggtggtggcagaaggattaggagttcaaggttggcctgtgctacatgagtctctgtctcagaaagaaaccaagttggccaagctgcaggccagcctgccccctgcccactgtcaactcttcttgttagagtggagtgcttcctctcagggagctctgcaggagggaagagacgatgatgtgtttccaagcacatatctgacttatgtgcggatgacaatcaagctgagtcttttccacggtcatcagttttatctgtgacatctctgacacaaagacttgtatctgtgctctgtgattaactttttgaaacatataccaaggaagtttccgctgtgcatctgcaagcagatgttggtgtgaattcttactgcagttcatgaacagatttccacatttcccctgaagttccagtgcactctggcagcctggacctttactggcttcaagtggatggaaatgctctgaggaggtctttcttctctctcagctcttccctccctcaagctgtgctttgtaagggatatttgtctcactacatacacgtctgctttggcccgtcttgtcttttctgggtgctggtgccacgtgtcagaaaatgggagaaatatgtccacatcatgacagtttgtttgggtgtcacacgtggttatatagtcctgtctgcaagaagtggagctgcctggtgacatgcttaggctctatcctaggaaaatgttacatgtcatatagcatatctgaatgtgaccagataccgaatatgtctccagtaccaagggttgcttctgaggctaaagagatatgtttcttgcagctacttcatctgttccagctccaaagacgacagatcctccagccctcccatctgtgggctccctacccaacaccacctcctgcactgcacttctgccctcttcatcccagcacactgccactttgccctccttgtcccagtctggtgacctgtccagcaatgccctttctcagcttagcaggtacgtgggtgacagtgagaataagaaaggggatggagacttgtagggctcctatcagatgagaagtgtcatatagactttggttgtgctacacttgtttagactttggcctggtcacatcccagcatcagtagatacgaaaatcctaactgcgtctaatgtttctgctgcagagcctgaggtctgctgagaagcagtgagaacataagcagatacttaaggacttgcttgtccttagtttttgccctgtaccacttgaatgtgtgtctgccttaacgtctgtcctgattccagagatagactactgggataggataaaggaaagggagttagcttgttccccatgcttcctggtagaactcagaacaaacgtggttggttgatttgaactctggatctgatgagaatttaagctggactcttaggtgtgggctaaatagaaactctcttgactctcagtcttctgagctctccagctatgcaatcctggttttattctttttatagccaaaatggttataacttgttgaagccaggatgtatcagatgtcatggtgtatggccctgtagaccatttttgaccaacaggatgactttgtcacatgattctaggggcatcgtcagtgattggattgaccttgattatagcctgttaaaccaggtaagtcagacttccaggaacaaacttgctgacatgtggtactcctttttatcttctagttctctctccagccaccagaacagcttgtcctctccacatacagcgcgccccacaagcacgccccacactgtaagtgcccacacttcctgcactgtatacccagatctcccatgagttggttaattttgatctgagatgacccagagtctcctggttcattgccttagaccttgtgtgctttttcctcacacagatgtcggggctgtgcttgcttcaaggacttagggtgctcttttccctgcagggacagttttgtttcttgccctttttttatttcacaattttttgttgttgttgttattgaagaataggtttgtttctgtttcccgggtctcactgtcctgccttgtggcctaaaaaaaagatacaactaaattgcattcttttgtgttgatgtcattaggactttactaatggtggtgattaggtgtccactttgattgaccttcataccaaattgcctgctaagagacagtgtgagaaaagatgtttttagaaggtcaagaaatctaggctagtggagattcaaagtggagatgtcagcccacatttatgttcactcacatttatggatgtgcactgtgtttttccctgttgcccacacaagtcaggaagagggtttcagatattctcgctttatagctatgcatgattttgagataccaggtgtgtgctagggaccaaatctaggtcctctgcaagcttttaattactgaaccaccatctaaagttcctttcttcttatttatgtatgtgcaactgtttgtgtctgtgtctgtgtgtgactgcaggaaccatagagtctaggaaagggtgttggatcccctggagttgacatgacagttggttgtgggccctctgatatgggtgctgtgtagtggtagtgggatattggcagagacactccccctctagaagagctatgtgcgctcttaaccactggggtttctgtttgagacagtccatggaactcccaaagatccccttgcttctgtctctgaagatgtgtgttatcatgaccagcctccagcccagctttagtagtctggacggtaagtcatggtggctgaatctggccgtacagctagaggctgcactgaccctaagacagggcatctcactcatcttacagccgctgagcaatggcatggctcactgcctggtgagctgtaggagttctttctagctgtcccagctccgtctttcttgctatcaaatccacatgtattggcttttgttttgccagcatgccagtgtggagagcaccccatcctcagccaccttctcaacagctgcaacctctgccccaagtgccccatccacgggggtcgtcttgcctgggagcagtctgtgtctgggtgggaccacagtgagtgtgcccagcaacagtacccgggccacagcgttggtgacctcaggtatgtgcgccaagtcccttacctatctcctcaacgtaaacttccagacctgttccagacctgtacctccacctccacctccacctccacctccacctccacctccacctccaagcagctgagctgcctcacagtgaagtgggtaatctcttgtgtttggtttttcctctttataggcaaagcacccccaaacctgcctcagggggtgcctcctctgctacataatcagtacctcgtgggccctggaggactgcttcctgcttacccggtgagcacatagtagaactcctgattgcctcagggcctgatacattgcaggacttggtaaggggttgtgagttaggacagggctgcccacctgaggcagctcatctccctgtctctgtccacctaatacccaatgtgtcttcctccttctagactctatgtagacatgatctgtagcgcctgacccaagtcccattcctcagtgtgtctgctttggtgtgtgtggtctctaatgtatctgtgactctcctgaagatctatggatatgatgagctttggtgtgtgtggtctctaatgtacctgtgactctcctgcagatctatggatatgatgagctccagatgctgcagtcgaggctgccaatggtgagtacaaaatggcagcccagactctcagctctgctccttaacctgctcgactgccaccacagttggccttctggaccccagctatgggactctcccacactaccactgagaagctgtgtctggtggtgatatgcatggtttgacctgggggaggggaggcagacatatagggagcagtgctcatccccaggagaatttgagagactttagaccacgagcacatgtgaaccatgtcctgtaccaaatgtagtcccttattttcctgctccttttttttatattttcttcttttttaagaaaactaaaaatagctgaacatggaggtccgttcctgtaatcccagcatttgagaggctaaacttgagttagaccaacttaggctatatgttgagatcctgtctcagaagaaacaactatcacacagtcatgagagttgtacttggaaatataatgcagtcttcatctcagggcactggtgtttctttgggctgtagtggccaatggctgccctcatgactgctctcatgctcttctctctgtaggagaatgaggggcggggcttgactgactttattaaactgtcatatgggtttagcctttcacctttatttagaagaacgctgtccctggtgtcattgccttactttcagccagggttgtctgttctgaccctgagtctagggataaaatgatgggtcttataggagagccagtgttgagcagagaaccggagtggcccactcctcatgaagcaggattaccctctggttagccagtctcagcctggtgttttgtagagcatcagtcagtgacagacacagaatgtagacctcaacccaagcatggggctgcctgttcttcctccaggctcactccttctctacacacacccctgtcacatggttgctggccaggccacccagagtgaacagctggagggtcatctcctctccatctgttgaagtccttttcagagccagaggctgcctgaggacctgctgctgggtctaataggacttggaagaagttcctgggtagaatccaagtgtggcctgatgacactcaacagatggctttatcctgtgttaggtgttcttcttggctctccacgcacacccatgggtctccattttttaatttcctgtgtatgcgtgtttcgcctgcatgtatgtaggtgcaccatatatgtgcctggtgcccatagggtggaagaggacatcagatctctggaactggtggcagttgtgaactgccatgtgggttactgcaaaagcagccagttctcttaacctttgagccatctctccagccctttttctttttaaaagttttgtcttagaggacatctgcagtgagctcacagtagaaacagctttaaatttttccttggagcatattccagcctttcttggatttccttgttttatgtgaaagggtactcccttctgggtttcctccccccagtctccatttgggtttctgcaagctctttgcagttttctgtgcctcttggaattctggctgagaattccatgttttcctggtgtttaccaagacttgcagccaaagggttccagtgccactcccagctgagatgctcctgtctggcttggactcagaactagggcagctcagaatcctgggtagtaggggccagggcaggatttcgacctctataaagtataacccctttttactttttgtagctctgtgcagtgtcattgttgccagggctaaatgaattgggagagactaggctagttaggacctagacctgaggtcctgtacctggctctgcttcctgccccttctacgtttccagtggctcttcacttagtctcacagtagagagcagtcaagttggtttgatctgtactgtttaccaagtctccatatgtgttgtaaagataggtgtgagattggctctgtctgatgcaagcattaagatttgcagtctgtccataccttgtcagttgaaacgggggctctgagttgcacaccgagggtattgtcacattggagctctctggtacagctgcccaccatggtcacacagagtgtggcatcacccggagtgcccatgcttgttctgccagctgggtctgctctctgtgagggtgggacagatgatttgctcagtgaatctccttggtcttttctaggattactatggaattccctttgcagcacccacagcccttgccagccgagatgggagtttagctaataatccgtattcaggttagtttgctcagtgggcaagagtgggaagagatgggctggcctggagctagcaattggaggccagaaaggctgaggtgcttgaaggtatgagtcctgagctggcagttcctgttcgtgtttgtaacagccatcctggttcttctaggtgataccacaaagtttggccgaggagactctgcatcccctgcacctccaacgacaccagctcaggcacagcagagccaatctcagacccaccacacggcacagcagccctttttgaatcctgctctgccacctggctacagctatactggcctcccctattacacaggcgtgcccagtgccttccagtatgggcccactatgtttgtgagtatttctgcagggtgctccctgggctgtggcttcctcaaaggttgaaaccctggacatattttccagcgtctgtcagttacatctggccttcaggattgctcaggggtcagagtccattccccagctgccttcagatccctaatggattgcattcatgaaaagactgattctcttggttgtgacttggttttgtctgaggctgcctgatctcctctttgccttattctgacacactcaaacctcacctgcttgtcccactaggtcccgccaacctcggccaagcagcatggtgtgaccctcaacacaccccctaccccttttcagcaggccagtggctatgggcaacacacttacagcacaggtaagggcataccccctgcactgaggggcacagggtaggacagacttgcttagccaacacatgcctctttcttgtaccctgccatgctaggttatgatgatttgacccaggggacagcggcaggagactacaccaagggtggctatggtggatcatcacaggcaccaaacaagtcagctggatctgggcctggcaaaggtagtgtcaggtcctcacctgtaatagttgtctcctatctgactctgaggcagggctaccctgccagtctttggaactggcactgaatgctgtggggaacaactgttttttgtcctaggagtatcagtgtcttcaggcaccactggcctaccggatatgactggttctgtctataacaagacacaggtgagggtatacaaaggtgggcaggtagttggggagtggggagacatcagttcagcctggccttctcattgtcatctttgccctacagacgtttgacaagcagggatttcacgcagggacacccccacctttcagcctgccctctgccttgggctccactgggcccctggcccctggagcagcccctggttatgcgcccgcaccgttcctgcatctcatgcctgcccaccagcagccccacgcccagctgctacaccaccaccttccacaggacagcccggtgagcgcagggatggaggcagcctgcctgccctgggcctggggttgtgtgctacccattatagccttttctcctcttcctcctcagagtggctctgctcagcgcaaccagcccagctccctgcagcccaagactcaagcctccaaacccacctatggcaactctccgtactggacaaactagaccctgaaaacaagagggtgggctcttgtgcaggagagaacacgtggagcacatttctgggagcccggtgccctttcctagaattctgagacataactgtcagctgagcctctgtgggaagcctgcctcccagacccactgttgtatgtaatgtatttatgtatgtatttgtaaatgtgatagaagcctggagggactggggtgtggctactgggcagcatacaagtgtgctgtccccatctggacatcctcactgtagccaagtccacccctcccccccccttctgcctctaggccttccacgtggctcccagctcaggagctgtctggtgtgccactaaagggatggtggtttggggactggggtcaggtaccaatgaagaatcacgacttttctttatctcgctccctgtgaaatattgtttcttccttctgtaattacttcatacttgttgagaaactgatccttttgtcatttgtcatggtcccccttctaacaaatcttcagctgggaatagcagagatgatgcctgcacagcagggccttctgcttttggtctggtcctgccctaggggcttgcctttgaccaaccatttaaagaagaatctgaactgggtctcagagatgttcagcccgtcagctcccttagaaagaaatcaaagatctgcttccatctcagtgaaagcctgtctccaaacaaaggctcctctataccagttgtcccaaaccaggtgggcaactgcttcagggttttctctcacccaaactccacctaataaagttcttgagagca

SEQ ID NO: 6 - DNA, 51421 bp, Cricetulus griseus
  misc_difference 32411..32421: note = n is a, c, g, or t
  source 1..51421: mol_type = other DNA
ttaatgtgttaagagccattgacatttgaagatcatcagaagtgaagataaaagatctcaaaaattataatgtaagtgaatgggaaactacaaaaattggacagaaattaatattgccaataataacctttggaatcctatattaccccaaatgaaatttgttcatatgagtaatcagtaacttcaaacgttagtgccatgttccagtccagaacatccttttgtctggggaaagcagtcattaagttttagtcacccagtaattttccattggggtatgcgggtgcctctgtgtacttcctcccttttcttctctaggactttgaagtttgatgtgagaacaggatgaatagggaacaaattatatttatgtggagagtttgttttctggcagcagatacatacatacagatacatagataaccattttgtgtgtcttagtcataaagagtaagctgtttcctcccttcccaccttctcctttcatcccttcatttctctctgatctgttgagtattcactatgtctgtttatgatatgggctagatcctacatttttcccctcctgagacagggcttaatgtagcccagcctggcttcaaactcactttgcagcttagtgtggacatgacttctgatcctcttgcttctttctaccactcgagtacgaggactacagaagattgttgcacttgagtttggaaattcttcagaccaaactgtgggctttttaaatgccaggcaagctctctaccaattagtttccttaattcttgatagcttggtgctatgacagctatattactgttaggtacatcaggaccactcagtgcttttcagatgctctggagacctgcacattctagttcaggtggtgtttggtgaacatgtggtttgcagtttctagccattctgaaacacagggaacagatccaagaatctgtactgaatgaagtctgagaaccatcagttcagatgctttttggagtcctagtccaactccaagagtttgaagatgagggaaaggcattgggaagtttatttatccaaagacacagttaatttttggaggctgggaaaagttaagtgttttttctttgaagccttcacaggtcatgttgtatgttttgtttggctagacagccttgctatgcttagtgtttataagcccttcctccatctcacatactagtatcataaccagtccaccattgtacctggaaaaacctagaagcctgaagatcacagtttctgagtctttagccagatgtatggctgattgtgactttgaaataatcattgggtaatagtttgggtggagaaagagcactttttttgtaggtcagactttcatagtcttgtctggattgaggttctatgcttctgacgatctgacttcttttcgtagagtctgtaagtgggaagtatgggctagctgtgttgtgagcagctctgttcattgtttttctccccttgggctctgtgaagcacagtgttaggagttgttgagttaactgtttatggagccacagatacagccattgatattaactcatatttgtaatattttgtaacagtatatttgtaatactttggtatttattgaaaactctaaggaatattttgaaccatatgttttgacttaattttattactttacatattttatatcgtgtcttatagttcttgagttgtaccttgtattcatagatgaagtttacccagttaaaaaaaaataccctgttatgttggaaacatgaaaaagttggattatataatgttactactcagtttctgagtgttttgatatatgtcttaaaggatgcttttcagatgttaataatttgcttttgtgatgtgggaaccaagctgaagcttgaagttgctcaaagtgcttcttgtaagttgttgttcacctctgcacacatattatcattggcttcatagatcccaattcattatcattggttttgtaaactataggctcaaatttgcaaatagatcatctctcaaagggaacttagtctgggagtatagctcattggtaaaaccaatgttaggcattcccaggttcagtccccagcatcataaaggaaaaagaaagaaaaatgggactttattatgtaatgttaattcccttccaaagacatttacttaagtaatttcatacatgcagaaagatacttcagaatgacactatatttctaggataacctgggaaatgtttgaaaaactagaatgtcatagttttaatgtaactgctacctatggagttgccttgttaattatagatgtttgccattgatttagtttaaaatcagaatgaaaaatgtatacattgatcagttgaacctgtttcttacttcttgtgctcagattttgttaagtatttaagtatgtgttattaaagtaatctttacacaagtacctaaatttctctttcattgtgtaagagtctgtgatggttaatgtcacttggtaagatctaaaatcccctgagaaatgggtacctgacatgcctgtggggagttatcttgattttgttattccatgtgggaagacccatttaaatagaggttgggaccattgtctgagcaggggagccttgtctacaaaatggagaaagtgagctgcgctctagtgcattcatctctgcttcttgactctggatgtgagtaaccagcctattgctgggactgtgcagccttgatggacatgtccctgagctgtgacttcttcaagtcgcttttgtcaggcctcttctgacagcaacagaagacactgaagcagaatcttactgataagttcaggttgtcaccttcactacttcaaatactcaacagtactatattggaagacttcttccagcaaatcttcatgaaagaaaatgattagcaaataaataaatgaatattcactcatctattcagtgtaatcacagaagctaataagcatgcaatttgtattttatggtttctcaggagagcccttattatcatgatagatacagactcagaattttccagtgtccctgctaataaaagatggaactggaatttggattttcgtataagtgtgctgttgattttttactcccaatataaattatagcgtggaagtggtaaaaagttcttgggatgtacattttgctgattaaaggaaatttcttctgttggaaagttgatgataggctcatcttgtccagtcagttccattaaagtctaactacaaagatctcatttcacctaatccttctctttctctgtattcatttaaaactacttcaaaaacataaaaaagacattcctcagtcctgtcataaaaataaagagaaaatgaaaaaagctagaagtaatgactctatggcctgttatttgtggcaaccaaccagaaatgtaagtatgtagggaaccgtgttcaaaagtatggatgcacaccattgtcgtgtaggaatccatgaatggtaactcaggtatcaactagtccaggctaggaagaggatggagaatgggttgtgttttcttagtgctttggcttagtgataggaaatgagcagtaaaacccaattccacttcctcatcgtcacccagactttgaagtctgtgtggaaagttaagttaattggaaggactgtgatttgtgcagtaatagtagcgtttgtcctgggaaaggacctgcttagtttaaggcatgacacccattcatttaacagtgaattcacatatgcaagtagcatgagaagattatacaaaagtcatttattaagacacagatgggggctggtgagatggctcaggtaagagcacttgttgctcttgcagaggactcaggttcagttgtcagcacctatatggcagtttacaaccattgtaactctggttccaggagatccaaaaccttctgacctctgcaggcactaggcatgcatatggtgtacagacacacatgcaggtaaaacattcacacaaaataaacaactgtaagaatagtcttagtgggtatgtgttgttctgtgcttgccgagatcagagtgttgcccagatcaaagctttactgactaaggtgactaccagttcaggctttaggtatcttgagttacaatctgaaaaattcagtttaaaatatttctctcagttaactcatgtgtaaggaacttttcctgtaggcagcttgtgagtccacttaagtactaacttaaggtgctctctttaatacaaataataaaatagaattggaggagttattttaggacttctgtgactgtggggacaggcccggtgttggtgctagtgctggtgctcagcccttgttgctggccccacccacctcctgttgacagtcactttgattacagtgctttggtgtttgccagttctgttactgtggggaaaacaagtcttgcaggctgttaccagtataaattggttgttcagatttatgttggaattaacaggtcacatgcactgaattgatctggaaataaaatgataccaatgtaaccgtgtgttctagatgatctgttcttacttccttggaattttccaaagtgccagccggtgtcagccaaggctgtctgagctcaggtccactttgttctctgaatgaagattgatttctgtcatcagacacggtgataacacaaggtttgtgtcacctctattgtccttcagattggttacatttaaacatgtagagcaagctggagagatggcttagccgttaaatgctaggctcacaaccaaaaatataaacatggtagagcttgcacggtgtttgaaaacgaattaaaaatgtacagtactgtgttctggtgaagttgttttctgttttggagacagatattctgacagtaagttttttgtgttgcagaacacactgcaggccttttattatttaagtaaaaatttcaacagaatgactaacaagcataagcacacacaatgcttaggaaggacactagtccattgtgtgagtgttgagtgcaaaatttgcattcctagaaaatctttctcccaatcacaatacagaacacattctttaatatccgtgggcagcagcattaataacaagaaaacactctcaaaaaagtacctcttcttttcatgggatactcaacaaaaattgaattggtagtgagagaatctgtttaaacaaggcaagtggtttagatcttactgcagcagctgtggtcagctgagcctgggagtggaagaaacatggcttatcctgaaccctcttgagacttgtttatgaggagtgtgaaacacaggtgacatgactctaacttccgtgctgttttgagttaagaatgtgtgatgttagttacatttctagtatctctaattttcgattttataagaagtgtttttattgactttaggaatagtgggttaggaggaattaggggcatgaatgttggaatctgttagtgcttgggttttagtttctgtttattattgttgagtgctgacaaggattttattaacaatccagcagaccagtatgtcagagacagtactttgccattgctttcattaaaaaatactggtggtagacttgactttgtgtttgaagattggattagtgttattgaatagattgaaagttgtgcatggagtgtgtgtgtgtgtgtgtgtgtgtgtgtgtattttttaaaagttcccctagtatttatactctattataaggttgagttttggccagaaagattttgagtttagaaacttgtcagttttatattgtacatgaagacactttacagtgaagataggcttttaggtccaactggttgatttcctctctatttttaatggttccttatttatgatttcatttgttactcttctgatatggtgctcttgtatttccacaatgctgttggtgaacacttcctactagttcaatattaaacaatacttttatatagtatcaacattttataaagaatgagcttagattaagttgattaaatatatttgtctggtgtgaaaccaagattctttgactgaaagctcatgtttcagccactgggttctctgtctgtgtttcatgttttccttggtgaaccttccttctcacatttggctatgatgaggtgtgagagtgtcaaactagcacctcggttagcctgccagtctaacctactttgtacaatacatgatacacaacagcatttgttggttatgtagcaaaaagaaaaggaaagtgatttaagaaattcctgcttcctcaaatggagaagagggagagtaggagggcagttagctgaccctgccattccttagactccatttttctacaaagctgaggtggtgccttgaggtatggggatgtttgaggtggtgtgtgaaacctgctgtctgcagacattattgtttctttagcagcattaacaaaggatgcttctaggtctggtaatgtgtcagtacttctgtgggcactcagaggtgccaacattcatttgcttagcaggaattttcttaatttgcaagtttgcatctttagtcacttcaaaagaaaccccagaaaagtaggttctttaacttttgatactgttttgaaaaggacagagtaattcctgtctgtctgctgatacctggcctgtgttactgttcacatcagtgctgcactttgtggtagtagaagttttgaataggacagcaaaggaagagggcattgtggtaccacagtagatgagtagctgtatgagaatgactgagtcagatgacagggttctgtctggttctcgtggtgcgtgaagcactgccactgacagagcgcagggatggctggggatggagactgagtgctctcgctgttctgtgccctccttttttgtatatgtgcgttctgttctttcagagctatatgggattcatggagaaataagcattcaaataataccagctttattctttttatgtaggaatttggaagagtgtaatttgggctagaaagggaagagaatcttggattgacttccattttttagagtaatgatgagaatttagataaatgcattctcccaggccagtacacaaccattaagttacaccccagctgtttgtgagttgttaatggtcttctttaatacagtacagtaaaattgtaatgctgttgtgaggggtagttctcataggaaaaactgtccacctgaataatgtaaagtgtaatggacatcttggacagtgctggttatattctgaccagttttgctgtaatgcttcatcagtttctaagatttgtgctgcttatgcttcctgtgttgacctaactttactttatgcttcctgtgttgacctaactttactttctgaagagaggcattaatgctcgggggcatggagtgttgtgatcactcctgttgcacagcatagttgactctgtgttgttttgaatcttactaatatttacatgttatacagtgccttagaagttgctagttagggctttgagctttgtcagtatatgtttaataagtatgtgtatgtgtgtatgcttgtgtgttgtgtttatgtgtgtctatttgtgtatgtatttgtgtttatacatatgttgtgtttatgtgtatatatttgtttatatgtatttgcatttatgtatgtttgtgtttatatgtgtgttttatgtgtgtatatttatatgtgtatatgtgtatatgtgtgtgttcctattgaaagatatataggaatagaagattgtgattttaattttagttcataactctgcttcctggctcaggcaaaaaggcccacactaatcaggaataaaaaacaaataatgctgagggtcaaggctagcatttttcaaatgtttacatttgtgtgtatgtgcacagactgggagaggagagttggggactatttttgctctcaggagtggaagagttattaaacctagcttaacaaaatgatttcagtgtttgtaacagtagctctcagttcctgtcagtcttgagtcttatagtctccctctgctgacactgattatgggaactcttctgttttcttccttgatttttctttattttgagacagcatttcattaattctattagcaggctagaagttgctacctttccttgcttcctaagccttagggggcctgtccttccacatcctgccaactctggttcttggtgtttcggttgtgggcttagcctttcacaaacggatgagccatctctctatccctaactccgtttctttaaggatcagattggtagactttcacccattttaactttccacttctgtactgaactccattgtggtcaactgaggttttctaatggttagatgtccttttctagcctccgttaagtaaaataacagttggcatggtattgtttgtgaggaaatgtgctaagctgttagatgtattattgtattcatcattataagtatatgaatagctcttagcattgctaagtactcagtaggtattaactaatttatccaataagtttaaataaaattaaacctatgagtgtctatcatatgccagctattatcatagagctaggctagtgtttatcatctttcaagaaaattattaccctcctaaggaatgttttggcacatttctctgtcctatcccctcttcctcatgctcacacagtgggtatgattttatctactgtgtttgggaattaaaataataaaattttcactgattgtgttagtatatgcttgcaatgccagtacatgagcagtggagatagaagagtcagggattcaagactagcttgggctacataaaactttatctcagaaaccaaaataacatttaaaatttgttgttggtttttttttttttttttggccctacctcagtgggccattttattcacacccatggggctcatattctcccattgggaatgtgtgttctggattctggggatcccataatgatcagtatcgataggatgtggaatccttaaaggtttacacttaaaagaatgtgggacacagaaaataaacacataagacacacgtgatgctgtaggaaggaaggaaggaaggaaggaaggaaggaaggaaggaaggaaagaaggttgttaatgatacattttaaatatgaactgactgtgagcagaagttcaaaaaaggccaaagggaaaaccaggaatgtttgcaagaaaagagtcatcaggagtggtacccaacggtgcctgcagggaagccatagagcaactaggagatgaggtcaggacagcagcagatagcgagacaatgcataggtcgtttgttttaagggcttcacttaccctagcattgacatgggaaggcttaggaaagttgaggagagatgaatgatgatgttggttgctgtgttaagagtgaatggaagtgcagaggcaaggcatgtgttttaggaactccttcaggagggaaatgatacactagcagaagagctgtgtcacagtgattagagaatgcatgtgtttcgaaggccaaagacgttcttgagaaaaaagtgaaaaatgtctgggtggtggtggcacatgcctttaatcccagcacttgggaggcagaggcaggcagatctctatgagtttgaggacagcctggtctacagagcgagtgccaggacaggctccaaagctacacaaagaaaccctcttcttgaaagaaaaaaaagtgaaaaacaattcaagtttttggttggaggaagcagaaacaagcatagagttagctttgggggtctgtggaggcacttaaataagtaatttgttgaaatctgagtctagggaggtctagagttgacctggaagtcagggttccctcatgtagaggtggcagtgttgaaaggcccagtgaaattattaaggagggttatcagtgtcctggacaggagcagttctattggtataataaaagccctaatgaagtggggttaagagagaaatcttgctctgtaacacaaggtggactgcaagggctttaaaaggcctaggctaggtaagaagccatgattcaggctgaatccaggctttgtgattgagaagttttctttgggttcatttggttatgtggctataggtgtggaatagcagagagctggattttatgagtttttggaattaggactaggtgttgttggatatagttcagtctagttctcagagtctgagacaggagggttcgaatagggggaagccagcctgggctgcatatcagcactatctgtcaaagggaggaaggaggaaattgagaatattagagtcgtggtgatcctggagcaacgtctttgagaaatgagagtttagctatgatctcaacagggatggtttgcatgatgtgggtttaggtcagtccactccctaggcccagacacagaggagaggtgtaggaaagtagagaagtcactcatttgtgtgtgtgtgtgtgtgtgagagagagagagagagagagagagagagagagagagagagagagagagagagagagttgggtgtgtgttatgaagttgtgtccttagggcaaaatctggcattaggaggcataatagatgaagaggccatttaggaagagctatagtgaatacagagtttgtgtaagaagcatgttcaagcccaggaggatgctcattccccttcagtttcatctctgtcagaagcagagaaagccaggtagaagagaccagcttctgtggcagatgtgtgtatatttcagccactcatttgttactctgtctgtaaatgcattctgtggcgctcatgtactggctgaattgttgactaactgatgcatatacctgattttaaaggaaatatttagaacagtatttgatggaatactcgttcggtacaaggtagtgttattacatgatgtaggcagtagccaggcagcctcagactgaggagtcaggctagagaagtgtaagtggcacttgggatagaaaggtggaaagtgacttcagaaaactcatctgtgttaaggaggaactagaggagaatccagaggaagatgtgacagaaccagcaaatcttaatggcaacagaagaagcgtggctagaagacatgtgacagggtgtcactgacagtcaggttgaggtattcatgttgagttcctactaaatgactagcgttacaagtctgtaatacatgtgcgtgcttcctccatgtaaaggagactagaagaggacaggttgaagagcattggagggaaaactgaccttgtgtctgaggacatttcatcatctgagatgggaaggaagagttggtttgaatgaaaggaattcactagggtggggtaggaagttgaatccagccacccctcagcacctgtttccagtcctgtcagcttagtgttttcaacgagtaacagactgtggtggcagagtaatcgataggacatcttttattgatactgggttttctgttttatttgacgactctgtaatattagctaatgctgtgtacttattttaaaactgttttggcttgtactaaactgattttccatctctgattattatttttaacttttatttctcgtctgtacaccagtagatatatagttgtatttactaaataccaaatcctttctctactccttggatcagtataatttaatggattagacttagtcactatccagctttctccatggagtaatagctttctgcttatttagtgagcagatcaatttgagtagttttgcaagaaccccaccttcagtggcatcagcattttatatatattctttttgcattccctatctgtttaaccacttgttttttctgtgactcttgtgtgtcataatatggacctttctggttgtctattaagtaacttcctgataaaccaaaattcttccagaatttttccagcttaaacctttctcagtcacatttaatgcatccttctctgtgcacctgtagcacttgtttttaaagttactcttagagcatagttaaataagtatctgcatcgctggtgcctgttccttaatagcacatctaatactgaactctgtgcatctttacagtgggaagtcatgaataagtcagcatcaagtaaatggataagtaacacatgcacaaatgcatagaaagtaagctctgagcccctctgcctcctggtacatatggcagcacacatcagctccatctgaaaaattcctagactgaatccaccagctacacacatgattcagtttgttatcatggcggagactctgagccttaggtacctggtataagtctcacaagccccaggtgtgctaaccctacatgttgtcaacactgctgctgattgttctcaaagggtgctgacaacaaaaagttaagagccactactgctgtctaatagaaaaagatttttcatagtgacattggagggactggacttgagtatgttgaccaaagacattgctgtcaagtaagagcttgctactaacttctcagttacttcccttgaagcttactgatcggagtagtaccacagattgtttaaggattatttgtccttctctctgtctttttctgtgtagccctgctgtccaggaacttgctctgtagataaggctgacctcggacacacagagatctaatcctcttgcctctgcctcccaatttctgggattaaaggatacaccaccactgcctggctatttgtccttctcttcggtctagcatctttttgtttttggtttttgtttttttgttttttttttctagacagggtttctctgtgtagctttggagcctattctggcactcgctctggagaccaggctggcctcaaactcacagagattcccttgcctctgcctcccgagtgctgggattaaaggtgtgcgccaccaatgcctggccaggctagcatcttaaaggaagtgtttgctctagtgtcttaaggaacctttgcctgggagtgcatacaaaggactccagaaagcacaaaccttccttttctttcaccctccacgtttcctcaagtttctgttttattttatctgtgcatcctcatcattgcttctaaaagagtttgatttgaatcatccattcttttgatctttattctttcacttgtgtatttatccaacaaggactttgcaagtatctgctcaatgccagttgcatgtgagagtctagggacagaatggggtaactaacattcttctttcttgacatttcccttccttcttgaaatttgcaatcttatgatatgtagccaattattaaacacttgccaagctatataggagcagattaggataagtggaaagaaagaaaacatgaagtaccgtgagcttgctctgtgggtcccacatccaatagcattcctgaggaggaagtgatgtcccaccagccagctcccaaataataacacagagacttcttattatgacagctcagcctatagcttaggcttgtacctaactagctcttataacataaattaacccatttatattaatctgcattctatcatgttgcattgcctctctgtttactctctttgtctcccaagtgcctagattcttcctcatcttcctttctctccttggaaatcccttctatacctcatgtgtagctatttggctgttcagctttttagtacaccagtcatagcaatcaatatactttcacacaatgtacaaataccccacaatatttcctcctttttatctaaataaaaagaaaggttttaactctagcaggaaagctatatacaataagaacaattatcaagtaagaattacatccacaatgtttagtccatatatatttggcaaatttggagaaagtgctgtatttatactatcttagtgagtccaaagttttatgcctaaaccattttcaaccgtaacatgtattaccatcctggaagtatctttttagaactaaaaatatcttcttagataaacaagatattatgtttctcacccttataaacttttcatctcttatgtaaatttttttttctgaatttggtaacaaggaaaactctataactgtctcatcttcaattccatcagagactggagaaatatacaatactatctgagtaaacgggaactgcagagcaagcagcttccaaaacagtataaatgacagagacatctggatgcctggacagtcatccaaggttcctctgcaacattggggcatccatcttcagcctgcaggcctacaatatctgacaaactttactgtaaagcccagcgttatcttggcaaagctcagcagcctttttcctttgtgaccagtttggacagtatattgtcagcagtcaggcaagggcagtttcttacccaaatggctaactttgccatattgaaggcaaactctatatggagtttcctcaatgcctatcatcctattatgtagtagattgatgctgctaggagcagatgtttttcactatcataaaaagccttgtgttattaaaacattttaaatgccatattctgtaggtctttgaagtgtttgaagaccatttatttaaaatatatctgaccttgaaagcatatctaatatgactataagtttgattgttatagataactaactaataacctgtcttttgttgttatcctaaatagctttcaaggactaagactttacattgcctttttaaaagagctgtgtaggcatattaccttaaacaagaatagaaacatatacagtataacaataactttaaatttgtatcaatatacaaaaatatctttaaaaagagtagaaatatatatagagtatgttctgacaaaagcaaccttaaatttgtatcagtatatacaattccataccagtgtaaaatatttgagattaatagttgctttttagttaaaagtagattcaataattcacccctttattctttcattcctatattccttttttctttttagaaagatcattgcatccaatctcccttgcttagtttcctcccttaccatgaccagtaacaatttgtaaccaacctccctaaacaatgaaaaacatccataaatcactggatgaccagaaaccacccatcccacctcttgggaatgtgggcttcatgttctttaagctgcttcctgttgtctggggctgatggcatcttcaggggatcctaagaatgttgggataatggtcaagtcctgagaaagctagctgtatttttttttttaactttgtttagtctgtgtgatgggaaagttgtagagcttatctgaagttttggctgtagtctgtgaggctggaccatctcagctagcagctttgaagatgttcttggtgcagaattttgaggaaactgtaacagaggcgttctgaggggctggatcacttgggctagttgtctttattagtgtctagtccttcatctttttctaaaaatacacaaaacttttaaaggttatacatctgtgttagcacagtatggaatgtgcagtgtgcacaagtcagctaaagatgattttttgttctatttttgaacagataaagggtatttgttagctttataagtctgtttggactgtataaccaaacctccatccatgtcatatgaaagaacggcatgtaataataagtcatgaggattctgtagccaacaagatttagcatgtctcatccagtcttaagagctgttcccataatagagggatcacctttgtctttcttggctttttcctttatgtctttagccaagatcctcaggaggtcacccaccccactcccacccccatcgaatctgatcccgattatctttgtggaaataaaagcacaacctcttccccaatgcaaccattgtccaacttccattttgaagtcaagacatccctaaaatatataagctggattaatttagcagttccttccaaaatccagagtgtctcagcagctgtcggtctctgttcattagcattcaaaaaattaaagttaacaaagtgccgtacatgatccagacaccctgtatttcccatttttatatgttttccttttatattaccttactctctctttaaagactttgttacttttaaactattttttctatgaccattctcttttctttgacatccaagtacatttttaagcacactatacctgtccagaggttttcttgatctgtgcctgacttttgcacatctacagtgttttgtgatggcattagccaaaccttaaactgctgtcggcatctctctctcgggttcccccacgagcttagctttctgcctgtgggggctgtgtttaccgccccagctctgggaatttgttgtatgtgcctgaactacgagtttgtacccagtgccagctgctcaggtgctctgctgcacagccacacatctgcatactaagcctacctaagaaactgcagtcacccggaagctgtacttttttttttttttttttttttttttgtgaagctttcttaggccttatgtggttatatgtggtcccatgttgggcaccatattatgtaacaagtccttttctatcctgtcagtcagctcccaaataatggcatggagacttcttactaattatgaaagcttggcctatagcttaggcttattcccaacaagctcttagaacttaaattaacccaattatattaatctacattctaccacatggcattacctttcttctctcttgcacctcctctttcctctccatgtcttctggcatcatcaatgtgcctagattcttccacctcttcctctctccccagaaatcccatgtatacctcttgcttagctattggcctttcagctttttattacaccagtcacaacaatataccttcacacagtgtacaaacaccctacaactggtgacatttcaggcgagagctgaaattgaagatggtgcctgaaggaaccatgctgcctgaggaagtctgtcttatttaaggatcacagggaagacttgtttgttggactggggagaacaggggagatggatacacacagaaagttggagaagtctggggtcaattagctcatgtagtgagaaatttgtggtaagactttgttgctgttatttgctattttggggctaagagattactgtataacccaggttggcctcaggtctgtggtaatcctgcttcagcttccttatgcctaaaattagaagctgaatcagtacaacggcctcataaaatgatttaagctagagaatgacatggtttatttctacctttttactattgtgaataatgatgctgtaacatttatgtaccatttgtatctgtttgtgtgtcttgtgaggccatattttcatttcttttagggctatctttggaggtcatagtgtgtcttagtttcatttctgttgctgtgatacacactgcccaaaagcaacttagggaggaaaggtttatttggcttacaattccaggttatagtctgttattgagagtaagtcaaggcaaaaattaaagagcagctagtctcatcatgtcttcacttaagagcagagagaaatgaatgaaccaagctgtctatttgccactatgtaggctcaacaacttcttcacttttacagagttcaggaaccagcctaaggaatggtacttcgcacagtaagactggctggacccccatcatttagcagttaaaacaaacccacatagacatgttcataggctagcctgatctaggcagtttctcaactgagttctctgttcaagttgtgggtagttgacagaactaacctatagtgggaaattaccaatacggagtcagatagaaatataagggtatttaatagggaaaagccttacttacagagcgacctagccagccggcgtggtagcagtctgtacagcaagtaccaaagtgaaactgaaagagcaaacgcaatcacaccacgtcactctgaccacgccctcacaagcgtggtcaggcacacctgaggccagtccctaagtaggagtggctacagcttcccctacactaaccattatgtagacttactccaatttgtccatcaaaagtgactgtaccattttgcattccactcaggaatgtttgagtactagtttctctacattttgccaatatattatgtcctgttgtgtgaacagaaaatagacacataatttgcagtagtctaaggatggggtgttgaattaagactaagagcatctcactgcagtaacatgtccagataatatggaagtagatctacaggactttagagtgatgaggtgagattggtattccagctagtttatatccacttgacacaggctggcatcattgtaaagagaaaatgtccctaccagattggcttgtgcacaaacctgtgacacatcttcttgagtgatgataaatatgagaggtcctaactcattgtgggtggtgccattcctgggcaagtggctctgggttgtaaaggaagcaggttgagcaagccatgaggagcacccctccatgacttctgcatcagcttctgcctccagtttcttgctttgaattcctatcctgatttccctcagtgatagaatgtgacctgaaaattgtaaaatgagatgaactttttccaacccaagttgcttctagccatggtgttttataacagcaatagaaaccctaactggtagaacagcttgtagaacagaagtagagaaaagatagttttggttttcagaaatcacttgggacttggaattgtgttttgacactactcatagttctagatgagttttacatgaagtcaatgtcatgatatctttcactgacagctaagctttaagatgcctgtgaaaatgtcatataactgattacactacagagctgtaaaccggtgaaaatgtaaagttaggggttaacatagcttcaggttacaagaggatattgagggtttgccaaaacaaagtagaaaatgaatgctcttgagttcagtttggatagaaaggggaagtgagacaggcaagggagagcagtggattagaagaatggaagggttgagggactggtgtctgtatggggctgaagactatatgaaaagcaagtaagaaagcaagattgctggaaataaaaaccgtgtggtgagaaattgagttcctggggttaaagataatagaggcagagttgttctagaaccgataaggctcacattgatgaagtgggaatgtagatgaggaggagtatatcctgatggacaataaaattgccacacagatagcagctttggaatggaaaaaaaataggaaagggccaggtgaccaggaaaagccctttgtgtatgaggcatggttagttaacaagaagggattgcaacaagttgtataaaaggccatttacttcagaagtcttttacatgtgaagatagaaaagtacattactataggaaaatgagaaatgagctagaaaaatgctgagtttctttggcctttattagatgtggaaaaatttaaaaaaagaaaaaagctgccttcattcaaggggctcggggaagaaaattcctgggagatatcaactgaggtagaggttgtgagaattctgctgcagatgccaggggtgtgttctctgtggagtaaagattccagcataaatgttgagaattattgatggatatcctagacagaaagtgggtggaagaaactgagtaatatggtaacagacattcataactaagagatgactagaatcagaagcccagcatagcaagaggaacaaggacatggggtggactgatgaagtgatgaagtaatgaagtatgtgcttaggaaacctgaggaccaatttgttattgattgataaatgatgttagcagactgtacaatgccctgagatctagtgtattgccagttacaaggttcttattgtctggcagcttataattcacaggtgaggtggccatgtagctgaggctctccagtgttatgaagaaagtggttaagtgaagttaaagactgtggaaacataagatggagagtttagtatagctggaaggcctggggacttcttggaaaagtctaggttttccctgagtctgataggaaaagtagcatgttaataaatgggctgagctaaagaaatagtctgtgtgggatggcatgatgtttgggcttgtggaacaattggtaaaacaagtcttgacatgaagatgagtaatggagaaaatgggaggggaagaaaagtgggaattagatgtgttgtattaatagccgtggtgaccagagcatgcacatactaatatgtgagaaggaaaaggaggagggtggggtgtcctgaaacagagttgtgcttctttgctgtggtacctcaatctgaggaagcccccttccctgcccgttcacccccagcagcacttgatgtggacagcagcttttggcaatcctgccaatgtgtgtttctgatgtcatcacagggagagtgttgtgccacatccacaccctgtaccctccactttcatcttgtctgaaaagagaacttaaaggctggccagctggttcttgcttgaaaacccagattttaaaatctgagattacaaacttgatttctcttacttattttttcactttgcttctaacagttatttggttccttgatgccacattgctctatcaatatttttataaataatgtaactaagtagaaacataatttggagttgtattgcttttaaaagttatccttattctcacagaaggttgtgaagtagtcctatatgtattttaaacttacccaaatggaatttagggttgctgtattagagttttgtttagttgtacaaaacagaaaatcctattgcagtgatttttggaaattgatgttcatttattctatgtgacatgaattctagggttatgggatggctgcagctgcccagcagttttgtgaggtcctaaagacccacctggtggactttttgtaacccccccatccccgtttacagaatgactgcaagagaaagggaagacaataaggcctgtcttgcatatatgccatactccgttttagtaaaaagaggtctccaattgctattagcagacttcgaatctgatttcagtgactagaattgtctcttctggtctttgtagccacaagggaactaaagtgactcttgtcttctcaggcccagcacaggatgctatgggagaggaaaggaactcttccatggagtggtgaaaatgaacatggattacaccatggtcttaagttttatttcaactgctaaggcaaacagtgttaatcaaaagctagatgcaatgattttgtattttgttcatttatttgctacttgttattgttaataaacaggcttaagatggacttgtttattttaaagctaaaataataaatattgtcacaggtcctaagataggaagcatttcaagaaaaaataatgaaacaaatttagactttttatgtaaagggttagggttttaatatatttgagaatgagaccttaaaaaatacatgtttgtacatggtggtttatacctgtaatcccagcacttggaaggctgaaggcaggaggattacaagttgggtgttcagcctgagctaatttaaaagtaagtgtgtgtgtttgtgtgtgtgtgtgtgtgtgtgtgtgtgtgtgtgtatgtgtatgctcatgtgtacgtatatactaacatacatatctgtatacatattttaaatctgcattttaagctttaatatagtgtcttttcattgttaacttatttgaatatttttaatttaatattttatatgatttagattttttagaaataaattaagaatgcattttttatccttgagggacttaaaatgtgtggggactgagttacattatttgacatcagtaaacaataaaaagtgtaatgtgatcaagtatcaaaagttgaattcaagaagaatggtaactgttgactgtgattacttccataacagtccatgacaggctatgtgagagtatggagtcaaatgtgttaggaggccccaaggagcaaaggcgggtctgtctgcaccacccagcctcgttgaactacatgcagattcttggatgttctctgtgttttcatgttgccatacctttagcattttttttatccatgaaaatttattgcgtaacttcttttaaatgattagttttttaaattttatattactgtttcattcatgtaagatagtattatatgatacattgtatggtacaggtccctcagaaattctaaggctctcctatacttctttgaggaagtaaagactcctcagacagcatgtgaatacatttttaaaagaatattaatggaacagaattttaatagcactgcactaaccagcttcaaaacctgggcggactctgaattgaatgctggcctttatcaggagattatcattgatgctttgtggctgttcagcatgcgcacaaaccagcacctgacacaaccattggtattcactgtgttagtgtgtttactgaaccatgaggtttatgtcaatggcagcagaacttttctgtaaaaactatgtgcaccccccaatcaagcaatattttgtccaaaacttactcactaatgtagaatattaaccaatccattagtgagccactaaaagaaaaaaaatcacaaaaagtaatcattaagttttaattattttgttaacataaagggtttggaatgccagttaaacatcatgactctgtgtactatggtcagacagtgtttacagcacttttttattggcctggcagtttactctttcaggactcagctcaaatgcaaatgttcctaggccatggtcggtggcgggtgcagtttgcagcaggaagactaggttccccaccagcctggtaagggcaattgagaacttgcacctaaaatatagtatttttagaaagggctagaatatagctcagtggaaccacagcctggcatgcacaagatctgattcatgtgccatcatgtgccgttgcctaagttctccctgaattttcaggtgtgtgtgtgggggggggggtttaccacatggcccatttattcacttgcaaggttatgtcacaagctcatgaaccacatgcacatggggactatgccaaatttacctttgagtcactgtgcctgatgtgtagtggttttgtatattggaaagttcttgtaaacctttttacacttattgattttgggtgtatatgtgtttatttgggtgctcatgcaatgacgtgtgtggatattgaaggacaacttaggggaattgggatggagctcatatcatcaggctttggggagctcatatcatcaggctttggggagctcatatcatcaggctttggggagctcatatcatcaggctttggggagctcatatcatcaggctttggggagctcatatcatcaggctttggggagctcatatcatcaggctttggggagctcatatcatcaggctttggggagctcatatcatcaggctttggggagctcatatcatcaggctttggggagctcatatcatcaggctttgaggcaagcacctttacttgttgagccatctcaccagtccccctccgtgagtgttctttagatgaataagtaagtaactgagtggatggatgaatggataaagggaaggaattcatccaaatcatgaatattgggaaagtctattcagacttgagattcaagcatacttaactattaaagaacagggtctgaaaatttcctgtctttagaaaccattgaagaggtcacccaggacttgctgacaatgcaagttgcagtaaatattggagttacaaaccaaacatctaaaattggtcaacatagctccattttccaaaacatactgtgttttcatattttctagtgcttccacttctcattcagagaactcggtgcatacgaaatcagtttctgccatatcttcagattccatttcaacttcggcagacaacttttctcctgatttgagggtatgtatgctgcgtgaacatactgaggatggccatactgttcagtgtctgaccagcactgtcagcaaaacctttaataattaagtaggtcgtggcagagagttctcaaagaccgcagactttataaattctcccagaccaggccagcaagtttgaatgcttgcttacgattttattttatttttttattttttatttatttatttatttatttttggttttccgagacaggatttctctgtgtagcttttttttttggagtctatcctggcactcactctggagaccaggctggcctcgaactcacagagatccacctgcctctgcctcccgagtgctgggattaaaggcgtgcgccgccaacgtctggctacttaccattttaaaaaatgtacatttcattccttaagttagtactttaaaatattttgtctaatttattttgtggtacttttttcccaatagcttccatattaccaggcagtaataactaacatgcattgagaacttaccataagccagttaactgttgctctaagtaaattatctcttgtaatacttgagatgttttgttatttccatgtagtatcttagattaatatgtccagagattcagagctaatgtcatggctaatcagtttagttatgtttagccagttgtattagtcagggttctctgaagaaacagaactgatagaatttattggagtgtcattcaggctgtgatctgagtagtccaatgaagggtgtctcctgatgcaaaggccaagaccctaatagttgttcattccacaagactgagtgtctccgcagtcccaatctggtactggagtcccagagaattcgtagagagctgccagtcttcagtctatgttacatcagtgaaagaaagcctcagcaagagtaaatgaacttcccagcaagagtgagggcaagcaggcaaaaacaaaagcttccttcttccatgttcttttatgtggactgccactgtggtgtggctcagatataaggtgggtcttcccacttccaataatctaatccaaaaacaaagaaaacaaaaaaacaaaacaaaaaaccctcacaggagtgcccagctgcttgggctttagttgattacagatgcagtcaagttgacaaccaaagctaacctccacaccaccgttctatcttgttgagtccaattctgtagttactaagcaccaggtgatggatcattcttacacatctcagtacattgtaaaatatccctgtatttttgccttatttctacagaattaaccacacatcaatgatagcatatttgtggattcatctgcttttcttcaaccacttgcctgcctctgcctcccttgagtgctgggattaaaggcgtgcaccaccaacgccctgccagagtttctttttaaacagtagacattcattttcatggttctagaagatgggaagtctaggttcaatgctacagaccagtgtctgcaagcatattctatctggtgttctgtattatatgggacgatctaagagaagtttactccagattgtaattcagaatgcctctctctggcagcagggaggaacagtttctatgagctgaaccctgaatagctgtacaaaggcttaattatttttacacaaaagtcgatttttttttcttgtaggaataaatactgatctactaccagaggccccatagattgccaaggcctcctaactgacacccatgttctgggggtctggatcaggtattcacaggtagaccagtggcatagaattgaaaaccctgatatcaacccacacacctatgaacacctgaaatttgacaaagaaattaaaattatacaatgtaattgagaaagtattttcaacaaatggtgctggcataactggatgctggcatatagaagactacagatagatccatatctatcaccatgcacaaaactgaactgcaaaaggataaaagacctcaacataaatccagccaagctgaacctcttagaagaaaaagtgggaagtacccttgaatgaattggttcaggagaccaattcctgaacataacacaagttgcacagacactgagattgacaattaataaatgggacctcctgaaactgagaagcttctgtaaggcaaaggacatagtcaacaagacaaaatggcagcccacagaatgggaaaagatattcaccaaccccacatctgacagggggctgatctccaaaatttacaaacaactcaagattattttcttaaaaaactaggtaacaggatatttagaagtacctaagaaataatcatagaaaatcctgaattggaatttttcatgtaagcatcaaagtacctgtttctaaaatactgtaaatgaaacaaaattgtgaaccatctcaaagcataacagtttatggaggaagaatttgttagacggctttggctttcactacattttatagacagtttgatataacagagtctcaagctggaccaaaaataattttaggtgactactgtaaagtaatccattttttattgatcgtaattttgatttaactccttttggccgttatgaaaatgtaagaaacatgtaattatatttttggacattgcattatgtagaagaaatatttttaaactttatttgattttagtttacttttatctctttttaaaattcattccaagcctgtttcattgctatttttttaattttttatgttatacaaaactataaattaaaaaatttgaccaatatacctgattttaaccaaaacccacttttacctgttaggcttaaccttgaaaacacatataggctaaagcttgttcttgtgaatgaattaaatttgaacttagcgtaactataaacctggccctgagcacatttaaaaaagtgatcatttaaagtggtttaccattaacttgtatgtcttaaccatcttttaatagtttataacaagttagcagcttttaaaagtttcaaattttacagctttactagacatacatctctaagttaacttctgtcaaccctttataatcttaagaatttatcatcacacaaaattcattctaatctaaaatattttgggtctaagaaaatttttaggtgttgccttttactaataacagctacagctattcttgactttcctcttaggcagggttttgggtattttgttttgttttgttgttttggttagtgttcttttttgtttttgtttttgttttatgagacagggtttctctgtggctttggagcctatcctagaactagctcttgtagaccgggctggtctcgaactcatacaaatccacctgcctctgcttcctgaattctggtattaaaggcttgcaccaccacggcccggcttggttagtgtttaaagcaaggaaactaagttaaaggagcacattaagtgttttttaaaatttttgtctctctttttttatttctatctccaaactgctcatgttatgcattctttcagatctaaccaacaacataccaagaagccactgtcactagcacagcacatagacagtgaagataacccttagaactgggggaatgcctttaatcttgtgtttcatggagtcttacaaaaaataatgacaagtattttagaacctttatagatatccctaaactgtcttcatgtgtttgtttaaatgaaaaataacattctcaataaacattcaacagcaaagaacctcattactgaagctatttgtattttccactatatgcgaatacaagacaagccaggaagagtaaaatgagtaaaatcagtgtttgtgtggtaaattttagagtgactgttttctataagactatcagtaagagactatttctatcagctaccactgttgtagccacgttatctgaatagctggtaacctattctgttttaggtggtatatttttgtagaatttaatggagggttcccagagagtaacttaaggaaacaggccaaatcctcaggagtgataaacagataagagtataaccaacaatatagttcaaaattgtaaattttgttttttttttaatttaccatgaaaaattaatcattcattagataatcaggaaaagagaacgtcctcaatatagtcaattactaatacctctggaaatttaaatagcattggcttagtgatttatgcccagattgcaattgtttttatatcaaaagttgggctttttaaatgtttttcccataaggggattattgatagttattccctttattagggaaaaacaaaaaccatttcccatgaagggacatttaaatattgacttactcccaatatgaggggggagaaacatttaaacaaaaaaacagccgggcattggtggcgcacgcctttaatcccagcattcaggaggcagaggcaggcagatctctgtgagttcaaggccagcctggtccccagagcaagtgccaggataggctccaaagctacacagagaaaccctgtctcgaaaaaccataaaaaaaaaaaaaaaaaccaaatgaaacaaacaaacattaacaaaattctcagttgggggttggctgcattagctgcagcagtgaggccccacccatcatccttggaaattcaggtgttgccactgttctgcattggcatgcccttagctgaaagagctgacaggcagcaagaagccagagagcggagttctagctgctagtaatttttcaatcttttggaaaaattctattcaccaataagcgaggataaaaagcttactttatttttatgatattttaggatttattgtgaaaatacgccatttttcatatgaatgtaagattttgtaattcttaggcactcaggaaatacttgtagaaaatggcagcttcatagtgtatgtagcaatactacagtttatataatttgatttaaagtagtataataagattgcaattcaaataaatgcagatcatctggatgaaatttgaatggaaaaaaaatagccttcgattaaaacaatgtttctttcttacactcccccatctaggtcctgagggagtcaaacaaattagcagaaatggaggaaccaactctgcttccaggagaaaacattaaagacatgggtctgtaatggtattttaaaatttgtttctttctgactatgcacagttgttcattctcctgtagctcccagcctgtgtgctgtaaacctagatccagagctgttgggtgtgtcctgtctcactgttgggaatttgaattactgcatttagatactgggttgctgagctagacacattggacatgtgatttttttttttaaattaaagtacagtctgtcatttgctccttttttttataattttcttccttagataaactcgggtaagttttggatgaagtctttcatgtgcattacagaacaagcactgtgtgtagacacggtctgctgcccagtacagtcctcatcatttgcgttgtgcactgagactgagcaggaaagctgtactgtgtgctcttgttctgttattcttgctcacaaaacaaatattcaaagattttgaagagcactgttaggaggatgaagaacatattttctttgctaaagtaaacaccatctttcatatttcagtcagttatcccccattaaaggaaatgcttcacttatagtgtaaaataggcatgccaaagcaaggacctatcctcagatgggctgatagtaactgccaacttagtttcttttccttccttccttctttccttccttccttccttccttccttccttcctttctttctttctttctttcattcattctttttttgtataaattttatttaaaataatcttcttttacatatcaatcccatttccctctccttaccatgatccccaccaacccccccccatcctatctcctatccactccccagggtgggtaaggccttccatgagggatcatcaaagtctgtcaagtcatttgtgggagggcctagggcctcccccatgtatctaagctgagagagtatccctccatggggaatgtgctccctgaagtccattcgtacactagggataaataccgtttccactttcagaagccacatagatccatcatttagcatttaataaagcattgactatgtctaaaattcgatgtcagaaacttggtcagggtatactatgctctttttaaaatatcttattccaaagaggtccagagatggcttggtggttaggagcacttgctgccctagcagaagactgggatttgattgccagaaccgtctgggtgctccttgagcctcggtcaacacctgcacacacacacacacacacacacacacacacacacacacacacacacacacgcaagtaaaacactggtaacacatacagaaaaaacattcattcaaagaaatgttattctgtctgcagtcttttaatgtctcagacatatagtcagctcaatactttctgatattgtatatattatggtcattttatttttaaagaaatagtgcaaaacagcaggtgaaagaggcctataaactgggaaatgagtgctggctctgtgttcatatgttgatcatctccctgccactccaacctctgacctgcttcactcagtagggacagcaggcaatctttgctccctcttcctatttctggagaggctccctttgcctttctgtttattttacaattcttagtgtaagacaaaattggaagcatggattaggctgctgaaggttttttatttaaatcattctgtggtttattttgtcacaattagataagcagtcaaattaatcttataaaatgtgtaagctgtttttaatagctattttgtcttttcagccaaagatgtgacttacatatgccccttcactggtgctgtacgaggaacactaactgtcacaaactacagattatatttcaagagcatggaacgggtgaggcttatgagtttggcttttgcctgtacatttgcttggtgtttggatgggtttgctcacttctgatttagtttttattattgagacaaagtcttatctgtgtaaccatggctgtactggaacatggtatgtagatctcaaagatctgcctgcctcagcctacaagtgctggggctaaaagtatgccctaccatacccaattaattctgggtaatttttgattcaagaatttctggttaagattttaccagtttggggggatgagtgttggagattgattgaacccagcgtcctgtcctgttggtgttattaaagcacttaacagttttttagaagttgtgtgttttcttttcatcttgcaggaccccccatttgttctagatgcttctcttggagtgataagtagagtagaaaaaattggtggtgcatctagccgtggtgaaaactcttatggcctggagaccgtgtgcaaggtaaattttacaacactgtgtggttgtatttactttggaaagctattaagtagaacctatacttggaaactggtacaagtcagtggactgcatactagaaatgtattctcatagaagcaaatgttttttgctattcacacattggtttgggctgagccagctgttaagacttcctgaagtggaagaacttcaggcagtttggtcctgtctgtctagcagaagagacataacaaagtgagctcctggaagcagtaataaatcagaaaatgatctctatatgcaagtgaaatgtagtaacagctgatcgtgttttttatttttaaaactcaagttctggtaattaaactaaggttcttgtgcttgtgaggcaagcattttgcctactgaaccatctctcctgcctaggaaaggacaaatgttgatagtgtgtattcgtcagttatttacatccccttgggccctactaagcctagacacacaggtctagattctgtgccatgtagtggagtactttgtgtttcttctgctcacagagaatcattgctactttgtgtcctggaacaattgttttgtatcctatatgtagagctttacctttactcaacatttccaagtaatttcatttcttcactaaaaaggaacaaagtgatttaactggatactgtatcttttctaggatatcaggaatttacgatttgctcataaaccagaggggcgaacaagaagatccatatttgagaatctaatgaaatatgcatttcctgtgtctaatggcttggtaaagtttctctctaacctgtaatgtaattattagtgtgatcaaactcaactaggttgtccagatcctcccctttgtgttcctgctttggcacttagccagaggctagcttgtgcccaaagtcaatttcagtaatgacattctataattatgttgactttggaggagggggaaaaattggagattgaactcagggcttcacacatgctagggaagtgctataccacagagtggttttgtttatttatgtgtctttatttgagacagggtcttttgaagttgtgtgggctggctactcctgcctcaggttcaggaggtctggactacagcctgtctctcatcttggctgtcttagttggtgtnnnnnnnnnnnccccccccccccccccccccccctttttttgaggagacaggatttctctgtgtaacagccccggctttcctggcactcactttgtagaccaggctggcctcgaactcaaagagatctggctacctctgtgccttccaagtgcacctacaattaagtagagtagaaaattccacctacaattaaaggtgtaaaggtgtgcgccaccaccgtcctactgaccacagcaactctttataaaggaaaacattgcattgtggtggcttaagttcagagatttagtccattatcattgtggtaggaagcaaggcagcatgcatataaacaatgtgctagagaagcagctgagtgctcttatatcttgactaccaggcaacaggaagtggtctgtgtcacagggtgtgacttgagcatatatgagacctcaaagccggcctccacatatcctgtaacaagaccacgcctactccaatgaagctacacctcctaatagtgctactcccattagaagccattttctttcaaactaccatatcagcttatataatatttttctttaggatgtttccatgattaaaagctttatgtagtcttcattagggtttgcaatcttcctggataggaactggcattaagactggaaatatgggtcagttattagttcagcagtattgtgacagtgataggttccctcatctgtatgatagaatttcacctaatgtcagccaacttcattcccatatgaaaatcaggatggataaggcagataatctattaacttaatactgggtttctcacttcagttgcaatttttttcttaaatactacagacttttctagtcgaatttaaaaaaaaagcttttatacactaaagtataaaaaggtcccttagtgtattagaacatacaatattacagagccactcagctgctgctgctctgtgttggaccagttatttctgttggaaagtgcatttttggagatgtcatttattacttagaattaaacctacaaaaactgccaaaatattttaaagtaataggttagcatttggaaaattttatgagtgggtctttgagcttttctgtacttcttaaaatatataaaatacttagtattgtaaattaaacagtaatttcagtcataaaactaaaaccattttaaaggaggaatttaaaatactcttgcagataagctaattaaaacataagtaattataaccctttaaggacatatttctgattgattgctttcttaaatgtctttttttaacttgtttattttgtagcctctgtttgcttttgagtataaagaagtattccctgaaaatgggtggaaattgtatgacccccttctagagtatcgaaggcaggtatgtgcttttctgttctagctttcatgctctgtattattttcattacagacagatcagagtcaggagttctttcagtgtctcttcctttttggtttaagtgaaggctaaccctggttcgcttggcttttcctttgaattgctttccagaatacactagtgatctacaaatctttgcttatctaggagtttgtctgaaaaatgtttgctctgtaaagatgtaaacagaatgagtatgtgtaaaatttaatgttcttatatgccttaatattattcactcagttttttcttattaggcatcctataatttaattatgaaaaaaataactattgattctaatttagctctgcaaaattttgggttttactcttcacagaggatagagtaacactttcccttgtgctaagggcagcattgacttaatttggtcagtacccatttattttaacgtacgcgcgcgcgcgtgcgcgagagcacgtgtgtgtggtgtgttgtgtgtgtgtgtgtgggtgtgtggggtggtgtgtgggtgtgtgtgtgtgtgtgtgtgtgtgtgtgtgtgtgtgtgtgtgtgtgtgtgtttggtcagaacccatagattttactgtcagcgtgcatgaatgtgtgtatgcacacatgtatgttgtgcctgtttgtatttgcttgcatgttttccatgcactagggattgaattcatggcctcatacatgtgagacaaatactctactactgagctatatctccatttttcatgtagatcaaagtttaattcctattaatagcttctcaaatattttccactcaactttgattcatttaagcttgaagagtatttattaatgccatgtgtgtcctttctgcttttctctactggagtcaggtgtttggtatttgttattgcttatgctccagtagagagggtactggccagttttctcactgctgtgttatcaggatgtagcagtgcctgacatgtcatagacaagtgtttgttgaatgattgaatgcatgaggctaagggaagagtttgcttacagtgtgtgctatctatgttaactaacaaatttttgcatactggtttatttaccctgtggtacttaagcacatgatgtaaaggtactaaatattatctgcatagcaagagtaaactgaggcatagggtcattaagtaatctgtccatggtaacatagctattaatgtggaagttgggaattgaatttgcaaaattatatttcagtaggtaagttagtattagtcagataccaacctgtagagctaatagatgagttaatctggaagatgactgtaaagaagttcatacatagacatggagtactacagtagagcatcagacccacaaagtcttaaaagtggctagaagaaataattctgttgggctggtgagatggcattaagcacacaagcctggagacttgagtttaatcccccaaatgcaaatcaagcacacagctgttctctggccttgacaggtgggctgcagtacccgcctttacccttctttatgtccattccctaccaataataataaattatttctttttattactgtcttttaaagaaaaaatttggctagcagtgtctgaggctatggaaatacacagcatatggcaattgataattcaggtgtcaacccaccagattctgatggagaaaatcttgtttatcaaggcttacagggggaccactgactctgaaaatgggttgtctatatctgtaatttttctcatgtgcacttaatttctttcctaagaatagctttggatgttttcccactgctcgtgtgtttgtcttgtaagaatattctatctattgtgggtggtcaggaggatgacttttcatttagctatataattttgatatatagaaaatatactaggacatgcttcctaactagatatatttgtctaacaaggactatagacacttaaaagcctgctttgttcatttttctctgactaactacacacagttagcttactttcatctcagagcaagttcaaaacaactaggctaaaagctttttgtcaatagatcataagtttaaaactttatagctatgcacaaggtcagagtcgaagatgtctgacccggttgctgcgcagagcaccttaggaagggcatgaaggttctttgcttgccaatctgttaacaatggacctgtgtctcagggtttgtcactgagcactgtgctccccaccccccactcccaatctggtcatggtcttggtcctgtgaccttgggaccttgtgtttccatgcaatggctcagctccttattgcttactctaggaatgtgtttttgaccaatgaaaggtaactcttggaagtttttttttaatcgtttcaaggctcctgtaaggagaagagtttttagaatagaagaggaagctggaggaagaagctaggaggaattgcaaatagacaggagaattagaaacagaagaatagagagactgattcagaaaagcacataatgaaagaattctttcaccctcagatatcctaagtcctccaattgctgttacatccatcctgaaccctgagaagagggtcttggggctgggcaccaaaggctctcattatggcaaattgtttttcaaaagtgaaagtggaggctagaggatagtgtgacctgattgtacaatgaaatttgctggcttaattctttatcagtaattatatcttgtagaaatggaagggaaataaaatcatctcctgacagagtactaatgaccagagaaggttctagagaatgtatactatgtatataccacagcaaatcagttaccttattactacctgatggctcttttgagaataggacactgctgtctttctgttccctttccctcccccatctaggttcacaccctctgatagaatttaatgaactaataggctactaaacattacatctgatgcccccccctgaaaaaatgcagatcctcccattaaaatatgtgtcttcctaaaagtctggccacatcaccatttgagcagttttaagatatgagaactggagataggtgagtggcttactgtcctggtgtctattttagctgacagtttgtctcttgttttatgtcatgtgtagggaattccaaacgaaagctggagaataacaaagataaatgaacgctatgaactttgtgacacatatcctgccctcttggttgtgccagcaaacattcctgatgaggagctaaaaagagtagcatctttcaggtcacggggccggatcccggtaagtaggctgagtgccttgagactctgtaggtacatttcagtacaggatgataatggccatagcatttatatgaggatatcagagactaaattaaactgtaaagttgaaacagagttgcctagttcctaactcaacatttgccctgtgtgttggttattctttatcttatatattctttagtcatggcaataaatgcttttttcttactgagtcaaagagtagaagactacaaattgatgatgtatgtatgactgtgtctcaaaagagcagatgaaataattttagaggcagaagcgtagaatccgagtcctttatagttttactgatatagtaataaaaaaaaacaagtggagtttgtttagctgttttattgtactttttctaagaaaagatttttcaataataagttttacaacagtatctaatttggaagtaggcaattctctacaaaacagttgactagaaagtatggtggcatattttcctggcatccagggccctcggcctgttctgccagaagtctgctctctaggagacttacaagcaggatagcaatatcaccatgttcctgtcattaaggttttatcatggattcatcctgaaagtcaagccacagtcactcgctgcagtcagcccatggtgggagtgagtgggaaacgcagcaaagaggatgagaagtaccttcaggccatcatggactccaatgcccagtctcacaaaatatttatatttgatgctcggccaagtgtcaatgctgttgccaataaggtgagggttgttttgttttttatttttagtaattatttgtcactctggtgttgctaaagccagctagatttgtctgtgctgttgcctggtaaaaagtggtcagaccctatggaggcagagagaggtcagactacactgaggaaatgatgatgatgatttccaagactgcatttcatttgtattatagaaaaattagttcatgcatttagctaagtagatgaagaaaatgttttaaaatgccccaaaacttggaacatcattaagttttgcttgtatttccaggcatatgtagttttctgtaaatatttgaagtgaaatggaataatttttgtaagttaacacattttatgtcactgaaaacttataatggtttcttaatgtctgataataatcacagtaaacattagactttttttgtcctcccattgtgagaggtgcttgagtgaccatccttaactcatggaggatatttctcattctgcatctgcatagtttgtttaaggccattgtgaactccaggtgtcctttgcaaatggcccttttaaaggaggtgagggaggaccatgatatcttaagtcattgcagtggtaaagcatagttgttggtttggttttttgttgttgttgttttttatcatttcttttttgtcagttaaactgatacccttcattggggtaaaaactacaaccaagttcattataaaagattttgtaatgcagaattgtttcattcaattagtattaaataatttgaatgctcaaaattacaggcagttttcaaaagcagactcacatcattgtgaacatcaaacaggcaccatccacagacatgttttatcataattttacattatactgtttaacacactgctcatcaccaatagtctttcttctttatgttattcttcttgatattttactgagtgtgatgcataaataaagcctgtaaccaggaagtcagatgttttctccaccaagtgctgattttcctccctaaattctgaccatgaataaaagtaaaaatcagacttagtcatctgtgagaaggaaaggcagcaactgtggtagggcaaagtgttgatgtcgtcaactctccctcctctacacctcattctggaaatctgcagcaagtataggaggagcagttttcacaccttgatgaattactgttgtaactgctcctgtggccaggatcccactgagccacctgtaccctaagggcagtcactttcttgctctgcactcctcacacatctttatgtatttcacaggtgtttacctctgcactctgcatgtcagctcatcttccagaatattttgttcagtgtcttaggattttgatctgtggtctccttttgcctatccagcttttcctttcatgtcacctgactctgtcacagtgtgggctgtttttattttgttcccaaatctctgaggtgaacgtgaggtttattcagatttaggttccatttgttctgtgggccactgctgactgttgaatctgttactttgattcacttgagctaaaatagtactttttaaaggtactgattgaattctttttgtaaagtgatgcttctcttacctttgattaatcaggataaatgcttcttaattctcagacatgagaggggctgcacaggtaggaatttatagagattagatagtgttggttgttttacacctactttaggccttagcacttggctatcaggatggaagggcccctcttagcttagggtgcatagcctctcactgtggagacaaggctagactgaaacgtgaagagatctgcctgcctctgcctggtgagttctgggtggggctaaaggttgagcctctgtggtaaggttactatacttctaagattaaagaagaaatgtgactttgtggacattcttctgactaaggtcatctgtgaccattgcagtctggtgccttccattcactgatggcagtcaacctttgggactattggtagtctgccctgtgcttgcctatacttggtagtttgagactcagtagagtagttaattaccaagtttagttttaaatgcttttcatcttttgctttactatctagttgctgtttaaaaaaaaaatacttaacggagatataactcagtgtactataagaaagtatccgttcctttagtgtattcacagcccatcgtagctatgagttctgtattatttccatcctcgttctgtagtgggtttctagagtaggtactgccatgctgtgggttgtagtatttcttcctgtttctgtgatgggctattgtagtagctactattaccatctcctgaaattcgttgcaacgaaattgctttgaaaatttctctatcctcaatcttacagttactttgttagttactttttatatcctggggcagaacagctgacaggactgctgtgagcatgtgccagttactcgctgaggcatgctgggagaaacctacgtcttctagctaggcctcacattgtaaacatctcccaacaatctccctaatagtactagcaactagggaccaagtatacaatataagcccatgggtgacatatgttcaaactataacacccattttcactcttcagaagtcatctttgttaacaagtattaccaacatttacttttgtaataatgttgaatacaaattactccatggactagaaatccgacaattttttaaattagtttggagttgaattcagaggtatcatagtcacgatcctattagtggagttgctctactgtactcccaatttgctttttgataaggcttcaagaagtgtgattttatgtatgagttaggcaagacagaagatttttttatgtactatatgtgaaacattctgatactgtcaacagatatgaagacatcaaaaatatagcttcccccatgggagtaggagctatgtaggttttgtataggcctatccctcaactaatcttcaccacatggcagagattatcttcatcctttttccagagcagtacctgtcatctcaagagcttctgaggatgtcctggcattttctaaatgtaaatccatcttcattgctttacggtttgacagaagatttttttaaacataaaatctaatattaaacttgggaaaattatgttctatttttcagctatagcttgtttggaaaagcatgcattttcttattttatagatttgaggatagtaaatgtcagtgggattctctgtttgtatgttaaatttaaaatgaatcagctgcttataatataagcaaactgaaagttaatcttgtcagtttgattgaaaagaggactattgtttctgtgagggcattttgagagataaaagctctgacctgcccaatgggttaatccatttttttatttacattttagattttgcaaagtttagtatatagcaggtagagcttagctgggagaaggggactacttggggtatacctttgagcggtggccttctgcccttcttgctactcttccctgtagcctggctgatatgtgtgaatgattttcctttgccatgttctttctccatgatgaacacactccagaaatgtggggcctacctgtggactgaaacctgtggaactgactgtgaagtaaatctccccaggaaatccttcctcaagtattggttcacagcaacagaactctaacttggagatcattatggctacaatgaatttgtttttctattattaactgaaatgatatgaaaaggaaaataagcttgggtggtctagaatgggactcttgcatgcagaaatgataatttgattatttcagtatgtttgaagggaagtctacataagaagttatagataggatttgatacacacaggaaaagttttctttacaatgctgaagtgctttgaaatgattcagaataaacaaactgatcacataggcttagcacagactccattttagaaatggtatgagtgtgtgtttattacaagtgaccctgagctactcctgctatccttatcctcagcaatgtccatcctattttagatagtttatggaactttgtaatggatgtcttcaaaagatggctactcattcatttatgattttctgtgatttgtgccctttagcaggcaaaagggggaggttatgaaagtgaagatgcctatcaaaatgcagaacttgtttttttggatattcacaatattcatgttatgagagaatcattacgaaagcttaaggagattgtgtaccccaacattgaggaaactcactggttgtctaatttggaatctacacactggctggaacacattaaggtgtgtatttgctactccttctcaaagcctccactcctttgcttgccttggctcttgtaactgaaatcagcaggaaggacctgctgagtagtggagccagtggctctgtgcacactcgggtctgaaggagctgcatcctatgctgtgcatgggtttctgctgcctcttgttttcctcttccatctgaattctgtccatactcaagagacagtgtctttcacttctgacagtcttcgcacattgtatccatttccagtctcttaggttctcaacccctactcaacttatatgccattcttcatttatttgactgtttttgaaacaagttctcactctgaagtccaagcagccctccacctgtgactcctgggattataggcatgacccttggcatctgcatcctttttattgttgattgatgcttcttgccatgtgactgaggtagtttttttttttttggggggggggttcgagacagagtttctcgtgtagctttggagcctatcctggctctggctctgtagaccaggctggcctctgcctcctgagtgctgggattaaaggcatgtgccacctacacctggctgaggcagttctatgtaacagaactatattagtttcttttaagacgtgtttaacattttttattagactttcattttacaccttgtttccagctcattcttgcaggggctcttaggattgctgacaaggtagaatcagggaagacatctgtagtggtacactgcagtgatggctgggatcgcacagctcagctcacttccctggccatgctcatgctagacggatactatcgaacaattcgaggatttgaagtcctcgtggagaaagagtggctaagctttggacatcgattccaactagtaagtaaagaaccttcattttatcatgtgctcatgtgggcatgtacatttgtgtgcaggctaggggttgttggttttcttcctcagttactatctaccttactatttagagacacacggtccttcactgaacccagagttcacagctagccagcaaaactaagagatctgccatttctgcctgtccatgctaggactataggtatgcatattatgcctaacttttacttaggtgttgggaccaaactcagatcttggtgtttttgtggtaaatactcagattttggtgtttttgtagtaaatacttaatgatctatccagcacattcatttttaatgtttcacaaacatcttgtacgagagagaaaaaattggccatttatttagcagagtgaagtcatgagagcactgtatttggtaaagtgttagtatattcttaatgtattgccatctgaacccaggttggtttaggcatatgaccttgtctcttctgtggtttctacctagaaattcagctgttactaatggccatggtgctgtccctccaaatggagcataaagtattgctagctttccctttggccttgaatgaaaaggacagtggttcagttactaattcagttacatataatgttgctaatgtagttcagggtctaaaaaattattaactaaaataatagagtaaaaaaatctggggtttcaatggtcaagaacatttgctcttgtggagggtttgagctcgtttcccagggctcagattaggcagcttccaagcgcttgtaacgagagctagaggatttggcactagccttttggtgtcagtcttcatgtgcacatactcatgtacatagaaataaaaattgaacatctttagactaaaatctacctccctagttattctttccataaatttggaaagttttacagattctcttaaggaaattgcaaaattttgagccctgtgttgttccaagttttttatttagaacttctggttaaacacagggatgtatacaacctagagaagcactctaccactttaaaagaaagagaagttttattttgagacatgggatcttgccaagtttccaaggctgacccctaaatgcagcttacagttccacttgtgatcttctagcctcagtgtctgagcaactagagttttctgtctgtcccactgggactggttttttgttgttttttgttttgtgtatttctaaattaggtggtgctgaaaacgtgttgttagttggattaaaatgtttatccatgaattcaaagtatatacctaaaacatctaagttgtacctacaaaattagtgtttagattcatgtccagaaataagcatacaccccttcttgaggccagcagtcccacttaagactcctgctggaatttccttgtgataatgaaatgaagtttcctgcttcctattgttccaaccctccctctggagacaaatgaaaagtgttccttttatttttcagatatttgaccatagctgtctccccacatcacccataagcttcagcttttccgaatgaacatccttgatgggctttgtctccccatcccagttgtccaccagtattactaatggctctctacaagtgtggtacccatagcttctctcagttctttagtgaaatggaattatgtcctccttgaaaagagaaaacataattgcctttgcttccttgtactatgctttggactcagggcattcttcagtgggatgttaaatctgctcaaggctgtattggaatcaggaaacatgggaacactttaccttgtggatctctgtcttcctcatgttatccatctgtgttattgtattggaatcagagtgaacactggggtcctgttcccaggaaggagaagtaggataagcagatgtctgggttaagaatgagtaataaccaaggcaggaatctggagtctagaggagggagaagccagagcattagaggcctggaaggcactgaggagatgggtcctggcatctgcataggtgctctttaatattattagtctttccttcgaaacactgtttactagcagtgtttataggtaattttaaagaactagaacttgaaattggttgcctctttttgaatgtcaactgtcaagcaaaactaggcagctgaggcatctccctcagtgcctcacactttcccattttttaagaaattaaaaaaatttcttccttaaaagtgtcatgtgttgctggggcagtggtggcgcgcgcctttaatcccagcactcagaggcagaggcaggtggatctctgagtttgaggccagcctggtctacagagtgagttccaggatgccaggactatttcacagagaaaccctgtttcaacccccccccccaaaaaaaatgtcatgtgtttcaaaaccataaactccttgattgcttgctctggtcacccattttccattctttctagttgcactattaatgggctcctttttcttttttaaaataaaaaccagtcaagaaggcatgctactgacaatctgttgaagtttatgaggaaaaccttatgtaggtagtctcataggagcccatttagagaattatggttgttttgaaatctgttaaaatgtagcaaataataagtttgttgtagaatccagaaaaagacaaaacaaaacatatctttgtcttgtctcccctgaattcttttagtctcctacattttctatagttttttgtaacagtatatattggttatgtgaaacacactaactcatgattatacagagcctcctgatttattgtttcattctactgattcagaggcatatgtatgtggttttatcagataagtggataaggcaaaagtttactgaaactctgatcttcaaattattagcaccaaatactatccatagtcttttacattaaggaaaacaaactgtatatttttgaaaaaaatccatcacatattcaagtcttatgagagccatagttaacattaaaatgttatatccttccattctgatgcataggataatcgaaaattgtataccttttccattttgtcatgagattaaaatgtttactcatagataagacttgttaatttttcttgctttgccaataataccctctaagaaaacttgattttctaccttcagttgtgagcatctggcaggatagaatacatacagtctactgtggcccatcaccacagcctagcttgacaaccaacagcagtatgcatttgcacgagtaccagtgctactcactgggaaaggtgaaccaaaacaacatcttagcagtatgactgtattttttttttttttttacatggaaacctgccccagaacttttatgccccactttttaaatgaatccctgctttgggatttttcagttgcatggttgggaacccatttgtgtgaaaaacagatccaagtacttctgaaagatcttgagatttgtgctaatgtagctatcttcttaggaggtgctttttgtcccagtgacctttcataacgaatatcttgtcataggaagttaaatctctagaacaaaactctgggctctaaggctcctctgttgttttagaatctgggtttcatttaagtagcaatgtgacagttttgaggaaattaaaaatactgaccaaattatacttttagaaaataagattctactaagtaaaatatcttacatgtgacatttcattctttgcttcagagagttggccatggagataagaaccatgcagatgcagacagatcacctgttttccttcaatttattgactgtgtctggcagatgacaagacaggtaacgcatcatctattaatacccttctcacacatctctaagctcaaagtggggaaacttgatcactgtttggcttgtgattcttgggtagaattcccagtgataacagctgttactgttgggcattaaaactttttagaagttttaatatgaataaagagcttgatactagtagcatcgcaaccaggggaactgataaaaatgaagattcctcctgtataataatagtcctttgctcactgaaagctctgtatactttgctaaggaagatgaagaaacgagctacattgattccagtcggaaccagacactattttgagtccttttagctgttttaaagaaagaagtatttggacagagtatcaaggcagcgatcacttggccccttctcaatgtggagctgttagaaccctgtaacagcctttgaagtagttgggtaaactgaccagtcttgaaaggtactagaagataacacttggttttacaataggaaacggggctgcagggtcttgaaaatggtttcaggagtagggttaagcctgaaggcatagttcttgttactggagacataccagtaagataaataaggcaagaatttgacccagctgtctgattggtaggatccaccaaggtcactaggtataacctgggagctgtgactgactagagtgctgtttgggtaggatggggagacattttttagaaatttaattctaaactaagaagggggaaaaaaaaaaccagaagttgaaagttaatttaatcagcattttaattacttagcaaaacaagcattagcagtaaactacatgtctccatagattttagttgacaggaactttttctaaaataccaagacagtattttccaggttgttgtggaatttttcacaaactattcagatttacaagtatgtttctgaatgattttgaaataataacagggtggattaaattaagccttttactaccttttggtggtctgtaatttaattcttcctttggtcctccaaaattggattgtataaaattaagatacccactgaagcttgtataggggtgaattctgtgttggactgatgttgccaattgtgaattacaaggacctgttcttcaacaagataaataggttgacttgtaagttgactgcatagctgcacagttacttacttctgtgtatatagtgatggcatttgccaaacacatttgttatttttaattcttagaaataagatgtgatgaaaactaataaacatggaagaccagactcatcagaattgctccaagtcataagtcagtggctggcaactatagggtcaaggcagagcagacacaaaaccagcattaagtccactcaatacttgctgcatgagagaaactctaccttgcaaaggaaaacatgccacaaatgcttaggtagtttcaaatctgtctaagtattattacagaggatctactcacgacagggataattatccctgaaaaatgtcttaaatttgtgtgctcaattttgcagttccctactgcgtttgaattcaatgaatatttcctcattaccatcctggaccacttgtacagctgtttatttgggacattcctctgtaacagcgaacagcagagggggaaggaggtaaggtatagctctggctcttactctggtatttggttttttgtatctcacaagatatactagtatatacttccatccgtgaagtgtgggggtgagaaaatcacacctataatcccagatactccagagggtaaggtagaaggatcacaaatctgaggccagcctttttaaacagatcccatctcaaaagacgtctgaagaaaagaggatgctggagatgtagagttcagtgatggactgcttgcctagtgctgtgaagtgctgggttcaatcctgctacaacaaaaacaaacaaaagaaccactctgtagaagcatcactgttggtggtactggtagttccctccatgcacatcaatgttcatcctaaaaactgtcagaaaataagggtactcacactgaaaagccttgctaccaggttcagatgttactcactaatatgcatgttcattcttatttctgtaaagcaggcaagtagatgaaaattaagtgcttcttagactgtactttgcaggtattgtatcttacagtgaatgtatttctgtgcatggtaggctttccatatgttacgtggtactagataatcaccaatagagcactgcagtgttctaattactatcacttttgagaaacccccttgatttaagtcttagctgtaatttaaataccataagccctcttttaaagtggtaatttaatggtatagccacagaattggaaccatcaaaatttagagcattttcatcacaccagtcacccatacctgtctatccacattctctcaggtttgggtagatactaacctggtttctcaggaattatgcactgtcattcaccatgtgaaatttgtgtctagctccttgcattatcttttcaacatttatgtcatagtactttcttttcttcatggtcaaataatcttccattgtctcaaatcaatcttcctttgggttctttattttggttgttgtgaatagtattgctttaaacatatggagcacttttattttttgtgtatgggcatgtgtgtttgtgcatgggagaccagagaggatattagatgccctgcagctaatgttttgagctacccaatgtggataaattttgatcctatctccagcactgaggcactttatgtaccagtgtttttcaatctgcaaatacaactgttgggcatttcatgttaactgtgttcatttccatcaaagtaggtctattagcagttagtttcctctattgttgactttaataatcacacagtacacaagtactgctgatgtggtggggaatctttaccagttttttcctcttgcagaatcttcctaagaggacagtgtcattatggtcctacataaacagccagctggaagatttcaccaatcctctctatggaagctactccaatcatgtcctttacccagtagccagcatgcgccaccttgaactctgggtaggatattacataaggtggaacccccgaatgaaaccacaggtacagatctacaatatacagtataactctactaggtctgtcacactctctctgtccattagtaattacaatccacagagtcacagaagcactgcataagacaggagactttcccaagtgcacacatcctgaagaaaataactttataaaagcctaaaaacagcaggtccacagttctgaagagttttagctagatgatgtatttgtaaagtagcatcttccagaaacgtaaagacattgaaagatcagtgatgacaataaaaccttgctttaattccactgaggaactcggtgtcacaaagccagacgaatggttaagatcttgtttggctgggattcctattacagtaattttgtttgctcttgcaggaacccatccacaacagatacaaagaacttcttgccaaaagagcagagcttcagagaaaagtagaagaacttcaaagagaaatttccaaccgctcaacctcctcctcagagagagccagctctcctgcacagtgtgtgactcctgttcaaactgttgtatgaaaggactattaggtcaagggcctcactgccaggaacttgacattacagcaccttacgggtagaaagccttccatgtttttaaacccatctatgggagaaaccttcagatgctgtatttatttcaagtctctcttagatgagtttggaaatgtctggtgcaggtgacaatggaaatcatttcatttgtaattaaagtatgacactaacttaagtcacccaaagaatactaaagtactggagtcctatttccacagtggggacacgtttttaattttaaaatgtcttaaaaaccaagcacctggtaagatctctaggtgggagaaaagaaagagcagctgttctaatacccaagagcatatgtctgggccttcatgtaaatgtcagatcaaattactcccttctcagatttctcaatttttgtggtatttaacagtaaaaaccattgttttgagattattactgcatatcaatagttaaaaattgctgctgacattgtaactagggtattttcaacagcagttaggaaatgatgccttatatatgtgctttggggggatgaggggacaaagcagtatctgtcatccaggaattcaaagaacattccacacccttcagactaatttacatttgtgtgttaatcgctaacatcacagaagacattttagaaactattactctattttatcttagtgataattggcaagttttaaagtctgactttagtgctatgtttaaatttcacatgaacagtttaccaaagaacacactgcatgtaaggaattacaatctaagtgccagcaagtaaagccttgtttctctattcacctgagttgggtgctggtgtgaacaactgacctcctggtatccattttactctgtataagagccatatgtaatgtactgtaacaaaggagcttattaccacttggtcttttaattaaatgacttcaaactttg

SEQ ID NO: 7 - DNA, 2317 bp, Cricetulus griseus
  source 1..2317: mol_type = other DNA
tctttggttcagtgcggtggcagcggcggcggcggcagtggctgctgtggtgaaggaggaggaggagccgagcgggcgttggtaccaaggcctgaccatggacgaggaatacgatgtgatagtactggggacaggtcttaccgaatgcatcttgtctggcatcatgtctgtgaatggaaagaaggtgctgcacatggaccggaacccttactatgggggtgagagctcttccatcacacccctggaagagctatataaacgttttcagttgctggaagggccccctgagtcaatgggccggggccgagactggaatgttgacttgatccccaaatttctcatggccaatggtcagctggtaaagatgctgctgtatacagaagtgactcgttatctggacttcaaggtggttgagggcagctttgtatacaagggaggcaagatctacaaagtaccatccactgagactgaggccttggcttctaatctgatgggcatgtttgaaaaacgacgcttccggaaattcttggtgtttgtggcaaactttgatgagaatgaccccaaaacctttgagggtgtcgacccccagaccaccagcatgcgtgatgtctacaggaagtttgatctgggccaagatgtcattgatttcactggccatgccttggcgctctaccgcactgatgactacctggatcagccctgtcttgagactattaaccgtatcaagttgtacagtgaggtcctggccaggtctggcaagagcccatatttgtacccactctatggcctgggcgagctgccccagggctttgcaagattgagtgccatatatgggggaacatatatgctgaacaaacctgtggatgaaatcatcatggagaatggcaaggtggtgggtgtgaaatctgagggagaggtggcccgctgtaagcagctgatctgtgaccctagctacatcccagaccgtgtacggaaggctggccaggttattcgtatcatctgtatcctcagccaccccatcaagaacaccaatgatgccaattcttgccaaattatcatccctcagaaccaggtcaacaggaagtcagacatctatgtgtgcatgatctcctatgcacacaacgtggcagcacagggcaaatacatcgccattgccagcaccaccgtggagactgcagaaccggaaaaggaggttgagcctgcattggagctgttggaacccattgaccagaagtttgtggctatcagtgatttgtatgagcctattgatgatggttctgagagtcaggtgttttgttcgtgctcctatgatgccaccacacactttgagactacttgcaatgacatcaaagatatctacaaacgcatggctgggtctgcctttgattttgagaacatgaagcgcaaacagaatgatgtctttggagaggctgatcagtgattgctgactcccctcctccagcccctgctcccctttccccaacctgtatgtcctttggggcagggaagatggtatggctgggtatccctgtttccagcatcttctgtttcccccaccacattctgatcacttaccttgttgatttgattcactgaccaaatccttaaccttagtgatggtttgggagatgggggttgggtagtatcctctttcttggttctaggaaaagaggattcctgtgtgtgagcacatgtgctcacgagtgtgtgagtgtgtgtgtgtgtgtgtgtgtgtgtgtgtgtgtgtgtgtgtgtgtgtatacacgtgtacaccctaattctgctgtttgggaaggagtggaggaaaagctgactctgcccccactgttcttactcctaatgtagtggcctttggagataccccatctccacccccaactcttatgtgttggagagaaggggccctcccagcacaaaattgcattcctcttcccccttataatttattctaatttattaactttgacctatctgtctgagccttcagcctttctgtgcagcctggggctgtagagttagctgccctggcctttcccatccctggcaaagtctgggttgggtgaaggtttatgtgtggccccctttgggagttgatctatttttaatttcttgtctttgtgttgtgttctttgagaaaacgtaaatgtgagcaaagcagaaggaggtgggaaagtggatccaaaccccagtgtgccctgcccaatgccttttcctttagtggttggaaacccttatcttgcaaagtgaatgtgtccccttccccaacctctagtgtatttcaaaataaaacccctccaataaaactgttgaaacctga

SEQ ID NO: 8 - DNA, 727214 bp, Cricetulus griseus
  source 1..727214: mol_type = other DNA; note = LOC107977062 Contig Sequence
  misc_difference 1..727214: note = N can be a,c,g or t
ctgatctgaacaaagggttgctcatggaccccagactgatagctgggaatcgaacataggacagatccagaccccctgaatgagaaggtcagtttggagacctggtgaatctatggagcctctggtagtggatcagtatttaccccaggtacagctccagcatctcctcgctgggccagcttagctgtgtagagaggctggggtccctgggtcagagactaaaagacacagcttcaaccagggcagaggccagaagcctgtctcaattctcctttttgatctgagttcagatggtcatgtatgaactttcttacctcagacatggatctnnnnnnnnnnnnnnnnnnnnnnnnnnnnnnnnnnnnnnnnnnnnnnnnnnnnnnnnnnnnnnnnnnnnnnnnnnnnnnnnnnnnnnnnnnnnnnnnnnnnnnnnnnnnnnnnnnnnnnnnnnnnnnnnnnnnnnnnnnnnnnnnnnnnnnnnnnnnnnnnnnnnnnnnnnnnnnnnnnnnnnnnnnnnnnnnnnnnnnnnnnnnnnnnnnnnnnnnnnnnnnnnnnnnnnnnnnnnnnnnnnnnnnnnnnnnnnnnnnnnnnnnnnnnnnnnnnnnnnnnnnnnnnnnnnnnnnnnnnnnnnnnnnnnnnnnnnnnnnnnnnnnnnnnnnnnnnnnnnnnnnnnnnnnnnnnnnnnnnnnnnnnnnnnnnnnnnnnnnnnnnnnnnnnnnnnnnnnnnnnnnnnnnnnnnnnnnnnnnnnnnnnnnnnnnnnnnnnnnnnnnnnnnnnnnnnnnnnnnnnnnnnnnnnnnnnnnnnnnnnnnnnnnnnnnnnnnnnnnnnnnnnnnnnnnnnnnnnnnnnnnnnnnnnnnnnnnnnnnnnnnnnnnnnnnnnnnnnnnnnnnnnnnnnnnnnnnnnnnnnnnnnnnnnnnnnnnnnnnnnnnnnnnnnnnnnnnnnnnnnnnnnnnnnnnnnnnnnnnnnnnnnnnnnnnnnnnnnnnnnnnnnnnnnnnnnnnnnnnnnnnnnnnnnnnnnnnnnnnnnnnnnnnnnnnnnnnnnnnnnnnnnnnnnnnnnnnnnnnnnnnnnnnnnnnnnnnnnnnnnnnnnnnnnnnnnnnnnnnnnnnnnnnnnnnnnnnnnnnnnnnnnnnnnnnnnnnnnnnnnnnnnnnnnnnnnnnnnnnnnnnnnnnnnnnnnnnnnnnnnnnnnnnnnnnnnnnnnnnnnnnnnnnnnnnnnnnnnnnnnnnnnnnnnnnnnnnnnnnnnnnnnnnnnnnnnnnnnnnnnnnnnnnnnnnnnnnnnnnnnnnnnnnnnnnnnnnatgtgtgatgtctgtggagcccagaagagggcactggagccacctgacatgggagccagacatcaaccccggggtcctctgtaagagcagccagtgctctttccactcagccctctctcctgctggagatccccatttctgaagagatttggccaaatcttggtaggagatgttcacagagaaagccaggaaactctagacaactcagtttccattagagtcccctttctgcccaatcacgtgtgtgctggatggttttctgtcagcttgacacagcgaaaggcatctgagaagaccgaatctcaattacgaaaatgcctcaggaagatcaggctataggtcagcctgtagcgcattttctttctttttttgagacagcgtttctttgtgtgtagctctggatatccaggaccaggatggcctttgaactcccagagattcacacctgtctctgcctctcaagtgctgggattaaaggtgtacactaccattgcctagcaggcattttcttatttagagatttatgaaggagagcccagcctattgtggttggtgcaatcccaggactggtggtccttttttctataagaaagcaggatgagagatgggcatagtagtccacgcctttagtcctagcacttgagagctagaggctggcagatctctgagttcaaggacagactggattacagagtgagttccaggacatctgggtttctacagagaagcacaaccctgtcttggaaatccacagggtggaaaataaaagcagtctttacaaactatgatgagcaaggcagtaagcagcaccctctatggcctctgcatcagctcctgcctccaggttcctgccctgtgtgacttcctgtcctgacttccttcgatgatgaacagtgccatgtttaagtcggctgaacaaaccttttcctccccaagttcctctggtcatggtgtttcatcacagcaatagaaacccagattaggacatgtccctgtggttttagttacccagtaaagtccccataaaacaataaggagtgagaggtgggtgtctaatgagagttcctgagaatcaaaccctgtaaccaatgcgacaccttagctcttctaaaacaccaatgttgctgctgccctcttccaaccatctctagaaatgttcttgcaggtgttgactgtagtaggagttaatgagccccttgatctgtctcaaaaaacagcagatgatgggactggagatggttaagagcactgtctgctcttacagaggacttgagtttggtacccagtatccacatagcagcttaaaaccatctggaagtcaagttccaggggcactgtcgccctcttatgtcctccacggagagtgcacatgtgtacagacacacacacaacacacacacacacacacacacacacacacacacacacaaaatactcatgcacataaagtaaaaataaaactataagaataatccagacggtgtcttccgtgggtaatgttgctgacagcacataaccaactacacagacaggtttgcttgctgtggtggctcatcttgtcagtgtgctgcacctgggaagagtgggcctcatctgaggagttgccgtcatcagattggcctgtggattatttgtgggcattttcttgattgctggtttatagggagcagaggaagccatgagtgagtgagtgaatgtgtgagtgcctgtgtgagtgtgtgtgtgagtgagtgtgtatgtgagtgtgtgagcgagtgagtgtgtattttgacttgggcatggctggttaaggacttctagaacaatggccatggaactttgacaatgacagtaccaatccaggcctggctcatgagggatggtattgttccatgtttttgctctttttgctctttggccttttttcaggggccaccacccagctccaagtaaaccacacagggaggtttattctcagttatgtgtgcctggccttagctcaccttgtttctagctagctttaattaagtaacccatctactctgggcttttatccttcttattttcctttctactccatggctggctggctgggtgggtggctgggtggctgggtggctgggtgactgggtggctgggtggctgggtggctgggtggctgggtggcccccatcttcctcctttccttgctctcttgctaatctttgtttctccttctatttatacctccgcctgccagccccgcccatccttgctcctgcctcactattggccattcatctattattaggactacagggtgttttagacaggcacagtaacacagcttcacacagttaaacaaatgcagcataaaccaaagtcacacacgtaaaaataatattccccaaaaggatggcaaagctttccttgggagtccaagtgtgagtgtctatgaactgttgatccatgtgtgcaaagattaccaacagtggcttcctgttcctggatgtttgcagcctgagactgctcacctatagagacctcgtacccagattagctagccccttcctccactgtactttaaacttgtgaaggttccaggttgtaacggtgtcagtagcattagagagacacaccgtatcccggcttcattgtgtgtgtgtgtgtgtgtgtgtgtgtgtgtgtgtgtgtgtgtgtgtcctttcttcattccctcactacctctagctagggttctaggaccagagcagtgggtgctacactcatgatagggatggcccagctcagtgtagacactcccacgcttaggcaggtgcgcctggggtttacaaaaagcagcttgcccaggaatccagtgagagccaggcagtgagcaagtctcatggtctctgcttcaggttctgcctccagctccaaggatgggctgtaacctgcaccccaaataaaccctttccactgcaagatgctttgggtcaccgtgtgtgtcccagcaaataagcgaactaggatagtatctgatggttggttgattgcaacactgtctcagccagggtttctattgctgcaatgaaacacccggaacaaaaaccaacatggtgaggaaagggtttgttcagcttacacttccacatcactgttcatcatctaaggaattcaggacaggaactcacacagggcaggaacctgagggaggagctgatgccaatgtcatggatgggacctgcttctgggcttgctcctcatggcttgctcagcctgttttctcatagaatccaggaccaccagcctagggatggaaccacccacaatgggccaggccctcccccattgatggctgattgagaaaatgccctacagctggatctcgtggaggcatttctaattgcgttgtcctttcagatagctctagttagtgtgtcaagttgacataaaacttgttagcacacacatcactagaatagttgtctgggcctggaaagatggtccagtgtttggcttatgtagggagacactgtagccccgaatcctaggagccctacaggtgtgcctgaccatgcccgagctgaaggctagtcacatagaggaatctaccaccccttggaattctatcaagaattagtcaggtaactggagaatgctgacagacctgaaagtcataaataaggtaattcaacctatgggctctctacagcctggaatgccactgccttccttaatgaatattgaataatgaatattgacaaataactcttaccgacttttggggaacaattagtaacaactatcccaaaactgacagaattaaaatcataaaagaagacggcctggattcttttatgcattgtaagacaaactcccatttctggagttcttacctaaaggatggctgatcatagtaattgacctgaaagactgcttttttactataccattacaagaaagtgttagagggaaatttgcatttactgcaccaattctaaataactcacagtcagttcggagatatcagtggaaggttttacctcaggggatgctaaatagtcctactttgtgtcaacactttgtacaacaacctttggaaataattcataaaaaaatttccacaatctcttgtttatctttatatggatgatattcttttataagattctaataaagaaactcggaatgtatgtttgacatggtgaaggaagttctgcctagatggaggttacaaatagccccagaaaagatacaaagaggagattctattaactatttaggatataagatagacttacaaagaattaggccacagaaggtgcaaattagaagggaccgttgtcaaactctgaacagtcttcagaagctactaggagaaatttctcaattacagacgattattggtgtagaaggacatgacttaaagcatttaaagatggcactgaaagatgataaggacctaaacagtccacgaatattatctgccgaggcagaaaaacaactacaatgggtagaaaacagaatattgaatgcacatgtagatcggataaaccttgatttagactgcattctggtcatcttgccatccagagaatacccttctgggattctgatgcagagggaagacactatattggaatggatatttctgccacataaacagaataaaaagttaaagacatatatagaaaagatttctgatttgattttaaagggcaaattaagacttcgtcagctgactggaaaagatccagcagaaattatagtacctttaactaatgatgaaatttcctccttatgggaggataatgaatattgacaaatagctcttaccgactttttgggaacaattagtaacaactatcccaaaactgacagaattaaaatcataaaagaagacggtctggattcttccacgtattgtaagacaaactcccaattctggagttcttaccttttacactgatgctaacaaatcaagtaaggcagcttataaagcaggtgaggtaagtaaagtaattcaaagtccgtatacatctgtacagaaggcagaattatatgcaattctcatggtgcttatggatttcacagaacctcttaacatagttactgattcccaatatgcagagagaattgtcttacacatagagaccgcagaattcgtccctgataatactaaattaacctcattgttcttacaattccagaaaacaatcagaaacagaagtaatcctctgtacattacacatatcagatcccatacaggtctgccaggcccactagcacaaggcaatgacgagattgatcgtttattaattggcactgtgctagaagcctcagatttcataaaaaaacatcatgtaaatagcaaaggtttaaagaagaacttctccatcacttggcaacaagccaaggagataatgagaaactgtcttacttgtttcttgtataaccaaactcggctgcctaaaggcattcggaggaatgagatctggcagatggaagtctttcactttacagaatttggaaatttggaatatgtgcatcataccattgacacattctcagacttccaatgggctactactctcaactctgaaaaaactgattctgttattacacacctgctagagatgatggcagttatgggtatacctgcacaaataaaaactgacaatgttctggcatatgtctccacaaaaatggaacagttcttcaaatattataacataaagcatgtcaccagtataccatacaatactttgggacaagatgtggttgaaagatctaatagaacacttaaggagatgctccatagacaagctggtaagtcaaaaaaccccaaaacataggttgcataatgctttgttgacactaaactttcttaatgccaatgacaaacagcttcagaaagatactggactacggaaaaaaaactgctgaactgaatcaaacagtatacttcaaagatgtactgacctcggtatggaagcctggacatgtgttacattgggataggggttttgcatttatttccacaggagaagaaaaactttggataccatcaaagttgatcaagatttgagttgaaaaagacaaacctatcgacaaggatgagtgacaggtatttactgaggtatatctcataaactaaatagaaacctcccaaagaaaagggaagtgttttgcttctatcttcacaatcttcacaggaaaactcatctccggaagtcaaaggacactacatgagtagatacttaaggaaagaaggtagctataaccatcaaacaaaaggaacgtgtcatgtggtaaactttacagctttctctcaaataactctatttctctttatttcctagtccctataaaaactgacaatgctccagcatatgtctccacaaaaatggaacagttcttcaaatattataacattaagcatgtcacaggtataccacacaaccctacaggacaagcaattgttgaaaggtctaacaggacacttaaggagatgctccataggcaagctggtaaatcaaaaccacccaaacatagattgcataatgcttattaacactaaactttcttaatgacaatgacaatggacaaacagctgcggaaagacactggactacagaaaaaactgctgaactgaannnnnnnnnnnnnnnnnnnnnnnnnnnnnnnnnnnnnnnnnnnnnnnnnnnnnnnnnnnaggggttttgcatttgtttccacaggagaagaaaatctttggataccattaaagttgatcaagatttgaattgaaaaagacaaccctcttgacaaagacgactgacaagtatttactgaggtatatctcatgaactaaataaaagcctcccaaagaatgggaagtgctttgttttatcctcacaggaaacccacctccggaagtcaaaggacactacatgagtagatacttaaggaaagaaggtagctataaccatcaaacaaaaggtaccctagagtggtgtaggaggggattgcaggtcccctcaggctgtaacgacccccatcactgttcagggatctctttcgttagagaaatcttattttcctccatttatttccctttcttttaaaaatatttatttttatgtgtatgggtgtttgacaagagtgttatgtccctgcaccatgtgaatgcagtgccccgggcggccagaagagggcagcccatccccccatcctgggcgtgggtggggtggggtgggctggagttacaggtgggtgtgagctggggaccgaacccaggtcctttggaagagcaatgagtgctcttcagccctgagcaatctctccagctccatacttgtccttggaaatgacaccatgctgagttttctggggttcttttctcttgcagcccagggcctcacccaaggcctgggccacgaaccccacccctgcctcctgcagagagggtttgaacagaagctctgggctctcagggtcacagagtgcaagccatgtacacactgatcaaagaaaaggagtttcccatctgtccccactgtcattctctacaggaaggtcccatgtcctccagtacaaacgcagcattagcacaactcacacatggaactttccagaccaacaggttctcctggatggtccccagctgaacttggtgttttgtcaaggtgcttcttacactctacccgtgcctgtttttaatgtgtagcctctgattacgtctttataccaaagcttttattttcttttcttttttttctttttttctgagatagggtttctctgtggctttggaggctgtcctggaactcattctgtagaccagggtggccagggattcacagagatctgcctgcctctgcctcccgagtgctgggattaaaggcatgcggcaccaatgcctggcttattccaaagctttagtactagcctttgaaataacagcaaaccctgttctttgagattttccccacacaccgggaatgttgcacagtgaacagagtgtccaccttgtacaccccaggccctgggttcaatttctcaacatctccacaactagtgtggtggcacacaggacaggcaggtgggacggctcagtagttagaggagcttgccaccaagtttgaccacatgatttcagtccccataacccacagtggaaagagagaactggctccccaaagttctcttctgacctgcacacatgagtgtgtgcacacgtcacacacacacacacacacacacacacacacacacacacacacacacagagataccatggctgggccgtgcctcatttgcaaatcaaatacatacagtaacacaataaatacataaaatagtttaacagtttagaaagaagattattgggagctggagagatggctcagaggttaagagcaccggctgctcttccagaggtcctgagttcaattcccagcaacgacacggtggctcacaaccatccataatgagatctggtgccctcttctggttgtgcagatagatatacatggaagcaaaatgttgtatacataataaatttttaaaaaaagaaagaagattattttacatgtcaatcccaggtccctctccctcccctcctcccctgccgcccacaaactaacaccctacctatcccataccctttctgctctccagggagggtgagtccttccgtagggggtcttcagagtctgtcatatcctttgggatagggcataggctcacctcctagtgtctaggctcagggagtatccctccatgtgggatgggctctcaaggtccattcctatgctagggataagtacaagaggccccatatatttctgaggtctcctctctgacacccacgttcaggggtgtggatcagtcccatgctggtttcccagctatcagtctgggaaccaagagctctcccttgttcaggtcagctgtttctgtgggtttcaccagcctggtgtggacccctttgctcatcagtcctccttctctgcaactggatttcagttctgttcaaggtttagctgagggtgtctgcttctacttccaccagctgctggatgaaggctataggatggcatataagtcagtcatcaatctcattatcaggggagggcatttagggcagcctctcctctgttcttagattgttagttggtgtcatctttgtagctctccagacatttccctagtgcctgatttctctttaaacctatattgtatccctctattttattatctcttatcttgctctcttctgttcttcccccagctcaacctccctgccccatcatgtcctcctcgcccctcctcttctccccttctcattctcctagttccctctcccctccccccatgctcccaatttgctcatcagatcctgtccctttccccttctccgggggaccatgtctgtctctcttagggtcctccttgtttactggcttctctgacagtgtggattttacgctagtaatcctttactctatgtctaaaatccacatatgcgtgagtacataccatgtttgtctttttgtgactgggttacctcactcagactggtttcttctacttccatccattttcctgtgaattttgagattccattgttttttcccccagctgagtagtactccattgtgtaaataccattacaagaaagtgttagagggaaatttgcatttactgcaccaattctaaataactcacagtcagttcggagatatcagtggaaggttttacctcaggggatgctaaatagtcctactttgtgtcaacactttgtacaacaacctttggaaataattcataaaaaaatttccacaatctccgccacactgatttccaaagtggctgcatgagttggcactcccaccagcagtgaaggagtgttcccctttctccacatcctctccagcataaactgtcattggtgtttttgattttagccattctgacaggtataagatggtctctcagagttgttttgatttgcatttccctgatggctaagggtgttgaacactttcttatgtgtctttcagccattttagattcctctattgagaattgtctatttagttnnnnnnnnnnnnnnnnnnnnnnnnnnnnnnnnnnnnnnnnnnnnnnnnnnnnnnnnnnnnnnnnnnnnnnnnnnnnnnnnnnnnnnnnnnnnnnnnnnnnnnnnnnnnnnnnnnnnnnnnnnnnnnnnnnnnnnnnnnnnnnnnnnnnnnnnnnnnnnnnnnnnnnnnnnnnnnnnnttttgtcttgctgactatgtcctttgccttacagaagcttctcagtttcaggaggtcccatttattaattgttgatctcagtgtctgtgctactggtgtaatgttcaggaaggggtctcctgtaccaatttgttcaagggtatttcccactttatcttctaataggttgagtgtggctggatttatgttgaggtctttgatccatttggacttaagatttgtgcatggtgatagacatggatctatctacagtcttctacatgccagcatccagttatgtcagcaccatttgttgaagatgttttctttatttcattgtatagctttatcttctttgtcagaaatcaggtgtttgtaggtatgcgggttaatatcagggttttcagcttgattccattggtctatctgtatatttttgtgccaataccaagctgttttcaggactatagctctataatagagcttgaaatcagggatggtgatgcctctggaaggtcttttattgtacagggttgttttggctatcctgggtcttttgtttttccatataaagctgagaattgttttttccaagtctgtgaagaattgtgatgggattttgatgggggattacattgaatctgtagattgcttttggcaagattgccatttttactaagttgatcctacctatctaagaacgtggtagatcctttcatctgctggtatcttccttaatttttttctttaaagactcaaaattctagccgggcattggtggcacacacctttaatcccagcactagggaggccgaggcaggtggatctctgtgagtttgagaccagcctgatctacaagaactagttccaggacagcctccaaggccacagagaaaccctatcttgaaaaaccaaaaaaaaaaaaaaaagactcaaaattcttatgatacaggtctttcacctttttggttagagttaccccaaggtattttatgttgtttgtgacaattgtaaagggtgatgtttctctgatttctttctcagcatttatcatttttgagttaatcttgtatcctgccactttgctgaaggtgtttatcagctttaggagttccctggtagagtttttcgggttacttatgtagactctcgtatcatctgcagacagtgaaagcttgacttcttcctttccaatttgtatccccttgatctcgttttgttgtcttattgctctagctagaacttcatggacagtattgaagagatatggagagagtggacagctttgtcttgttcctgattttagaggaaatgctttgagtttctctccatttaatttgatgttcgctatgggtttactgtatactgttttaattatgttcaggtatgttcctgttatccctgatctctccaggaccttcatcatgaagggatgttggattttgtcaaaggctttttcagcatctagtgagatgatcatgtggtttttcttcttcagttggtttatttgatgggttacactgatagattttcaaatgttgaaccaaccttgcatccctgggatgaatcctacttgatcatggtggatgatttttctgatttgttctttgattcagtttaccagtattttattgaatatttttgcatcaatgttcatgagtgatattggcctgtagttctctttcttagttgtgtctttgtgtggcttgggtaccaaggcaattgtagccttgtaaaaaaaagagtttagcaatgaatctttgcttctattgtgtggaacaatttgatgagtattagtattagcttttcttggaatttctagtagaattttgcactgcagccatctggccctgggatttttttggttgggagactttctaagttcctcagaggttatagatctgtttaagttgcttatccattcttgattcaattttggtaagtgatatctgtccagaaaattgtccatttcctttaaattttcaaattttatggagtacaggttttcaaagtatgacctgaagattctctagatttccacagtgtcagttgttatgtccccgttttcatttctgattttgttactttgcatgttctctctctgccttttggctagtttggataaaggtttgtcaatcttgttgattttctcaagagccaatctttattacattgattctttgaattgttttctttgtttcaactttattgatttctgccctcagtttgattatttcctggcatcttctctggggtgaatttgcttccatttgttctagaactttcagctgtgatgtcaactctctggtgtgactattctctagtttcttcatgtaagcacttagagctatgaactttcttcttagtactactttcaaagtgtcccatgagtttggatatgttgtgtcttcattttcattgaattctaggaattctttgatttctttcttcatttcttcattgacccaggagtggtgcaattgggcattgttcaatttccatgagttggtaggttttctgcaatttgagttgttgttgaattctaactttaaagcatggtggtctgataagacacagggggttattccaattttttagtacctgttgaggtttgctatgttgccaagtatgtggtcgattttagagaaggttccatgtggtgctgaaaagaaggtatattcttttgtgtttggatggaatgttctatagatgtctgttaatcccaattgggtcataacaaaggtctgttagttcctttgtctctttgttaagtttctgtctagtggtactgtcctgtggtgagagtggggtgttgaggtctcccactataactgtgtgaggtcttatttgtgatttgagttttaataatgtttctttttatgaatgtaagtgtctttgtatttggggtagagatgtttagaattgaggctttttcctgatggatttttcctgtggtgagtttgaaatgaccttcttaatctcttttgattgattttactttgaagtctaatttgttagattctaggatagctacctcagctcatttcttgggtccatttgattggaatatcttatcccagctctttactctgagttaatgtctgtctttgaatttcttgtatgcagcagaaggatggattctgtgttcgtatccactctgctagcctgtgtctttttaaaggcaagttaagaccattaataatgagggaaattagggaccattaagtgcttattcttgtttgtttttaatttgttgtatgtggatatacccttctttttctttttggttttggtaaagtgggattatctattgcccatgtttttgtgagagtagttaatttccttaggttggagttttccttccagtactttctgtagggctggattagtggtttcaatcactataaactgagaaaacaagatattccacgacaaaaccagagatagggtttctttgcgtatctctggttgtcctggaactcactctgcctgtctccctgagtgatgggattgaaggcgtgcaccaccacctggcctggtaattatatagttttactgtgtcagagttaaaaactttcccttttatttagacaaaaggggaaatgttgcaggatttgaacacagattctgggaggttctccatgttgtcatttatttcctccacaaactctgagtatctcaacctctaagtatctctgtgacaccctgtccttgaattagggggcaaaggcaaccactaggtgactggaattagccataaggatatgatgtgatagagaggcacaggaaacagtagggagtggtttagaaagattcctggtcctttgtgacctgggaggcatggagagagagggtcggctctttgttactcctttttttttttttttttttttgatctatcaggtttttaccccaatatcagactcccacgttcttcttaataatagaacaatttagataacacttcacatagctatgtcacctgcttgaggagcggatttcctacactgctgatggagacagtgacagcagaccaaggaaaacaaacagcttggtgagctctgagctgactggtcactcacaggatcccgggtgagtccggggataaccactgacaccccaccccagtgagcatgtcactcacacagctgcatcactgcagtccccagcacagctcccagcagctccactcaacagtctcctctccctcaggaaccacagctggtttagccctgagagggaagtgctacattgtgtcagctctgtgaacctggagcttcctgtgtttcatgagcctcctcagcctcctcctggctccagcagggattctccttcattctagagggaaattcaccccatcacctccctcttctacagcagctccctttgttaaaacaacctcaggccaagtgctggtgtgtcaagtgcagccccaggtcccctcacactgaggtcagggtcacctgagctttcctctcagcaaagccctctctccctgtccccacctgcttttctctctgtgatccatgatcctatattttattcattcatcaaacatttactgggtatgaatgtttgcccagtcctggcacaggaaggcattatccttcacaagacaaagatggctgtaccatgacagagaggatcaccgccttggtcatcagacatctctgctaaggctcctgtgactctaagtcacaaggctagaaagaaaccacaggggccataacctggagcaggagatgaagtaattttcatctctggttttcccacaacctatttttaaaagaattaactttacatctgtctgaatgtatttgcaccaggcatctcaccggtgttcagggagtattggaaaccatggaaaaggaattatggatgtctatgagccaccatgtgggtggtgatatctgagcctggtgcctctgcaagagcagcaagtgctcccaacccctgagtcatctcttcagtccttggatcatgtcttttaaagaaacacaaatctgaagactcagcctgtaaatcctggagtcaccactgtaggcagcacaaggaccctgtggatccctcgtttctgaacatcctacagcccaggttagattctgaaagatgggaaagaagatgacaggcaggcgtcttggaggaggcaggagctcaggagactgaagttcatgttctcatcctacagtctcctgagtgcagtggtctagctgggccttgaggggacaaggatgaaaaaaacagattttaatgctgtcactcagggagcccaagggaaaaggaggcaagctccactctcaggaacaaaaaaaggcctaatcctccatacaaactaaaaagtcaacaataaacagggaatatggtgtaaagacctacagccaggtcagagcccaggctgacctgtttcagcagccttggctgctcacaatcctggggacaggacagggctctggccatccctgtgtctctgtggctacagatctcagcatgtggtcctaagtgatgaagagaagagagcctggaggtgacagaactgaggagtgaccatgtcacagccaacaatggactgagctccacctggacaagccatgtgcacactcagctcctacaatcccattagatggacacagcacaatgaacacagattctggaaggttctccacactatcacttatttccttcacaaactctaagtatctcaataatttatttaacagacaatcaacctgtcagatcaagaatgagaaaaatcaagttcaaattgagatccttatttacagtggggaagttaggggtgcagctcagggcagcatggaggtgacacgatggagatgtccccttctatctgctggaacaggaagggttggccacagaagggaacacaggcagtgcagggacagggtcctggtgtacagggctgggctgggctcctcagttcttcacattgagcccataggatcacagggaacatcagacactgctgcagagagtcaaccgtggatgtcacaggagagagccgtcactccgtccatgcaaggcagctatcttcacgctacagaacaagagtcataagcaatcttgtgaagacaacatcccaacaacccaccactcactcacaggtgattctgggtgtccctgaaacccaatcaattcgactttgccccccaaccccaaatcaggtcccagagtgtcaactttacaatctgagagagacacatctgagctctgggaactgtccctgcctggggttaaaatatatactttcataggaagataaaaagatggcccctagaagattttgctgcatgcaatattatggattttcagagacccaattactctagcttcaccccacaggcctcagggagaatcctgctccccacacctacctggagctggagcatagttccctccttttccacctgtgagaagaaaagctttgagagaccagggaggagccaaccctagaacttttccagaaccaacagcagacccaggttagagacaggagcaatggggtgtatgtgtgtttccacgaggcagagaacacttctaaaatggctgagagagaactcagaccctgccctttcctacctgagtttctcctcttcctcacaaagaacaccacagctccaatgatggtcacannnnnnnnnnnnnnnnnnnnnnnnnnnnnnnnnnnnnnnnnnnnnnnnnnnnnnnnnnnnnnnnnnnnnnnnnnnnnnnnnnnnnnnnnnnnnnnnnnnnnnnnnnnnnnnnnnnnnnnnnnnnnnnnnnnnnnnnnnnnnnnnnnnnnnnnnnnnnnnnnnnnnnnnnnnnnnnnnnnnnnnnnnnnnnnnnnnnnnnnnnnnnnnnnnnnnnnnnnnnnnnnnnnnnnnnnnnnnnnnnnnnnnnnnnnnnnnnnnnnnnnnnnnnnnnnnnnnnnnnnnnnnnnnnnnnnnnnnnnnnnnnnnnnnnnnnnnnnnnnnnnnnnnnnnnnnnnnnnnnnnnnnnnnnnnnntccatgtcctgagtctgttcctcctcctccctctgccaggtcagggtgatgtcagcagggtagaagcccatggcccagcacctcagggtgacatcacctttagacccaggatgatgggtcacatgtgcctttgggggatctgtgtggaagatttaagaaatcccacaagaacaaggtaaactgaaatctgcaaagacaaagttaaatcaatgatgacactgaactgtgcgtctcaacacttctgactgtcatcacactggtgacctgcagggggcgctggtccccgcatcactgatcggcacatttttcagggggacccagaagctaaaagggaatctcatgaaccagcaggtcacacggtactccctatgtgatgttgtatagcataagttaggtggtaaaagtattgaacatggaatgaaaaataatttatttataaacatgattaaatgcatatcaaagtaagaaattaagaggaacggcatacatgaagggtgtcaccaactactgctgccaccattgaggcccaaccactatggccatcttgctgaccagcataactgtctgtccaagtgaacagccctcaccaaagtgagcagcagaaatggtgtgaacctctgacactcagccagagataatgactccctaaccccagcctctgggggccaagagaagatacaagctgttgtcacccaggatccctgaaaatagctgtggagcccagtgcagcactcactgggacataggtgctcacaggggtgtgtggattttacttatcagtcaagaaagttcaactcctaattcactaggagaaacactgcaacttgttccagcagagggagagcagtgggggtttggatggttaattctggcagaaaacagtctaagttcatgggactctttcctttaatgggaactctgacttctgtgattatccagattagcagtcgcccagggaacaagaaaatgacaactcaaaaaaagaaaaagataaaaaagaaaaaaaaccataactttgagtgtttttcagtgcacccccaaagtgtcacgtgaccattcaaggaagagatagatttggggtgagggagggatgcaaacctcacgcacaggaatctgggagattgtattctgtggaaagttctagaaacctgggaatcaccctagggtcaggcatccacctctctatcatgtactggagacttccggtcctggtgtgtaaggctgacacactcagtcaccgggtgtggacagagaacccggcctggcagaggccatggctgacacagggctgcagactgaggagccactgctggggatgtgggcatcttctctcccgccctcctgagacagatctggaaccgtccagggagaaggctgagccctgggagatgagtgcagcccctgccaggctggatcaggagccccagggacactgtgtcccctcagagacaggggcgtgaccccagctgaggttctcttcttcctcaggactgagcccagcccgagggcagagggaggagatgcccgcggcccctgcacctgtgcgcagcagctggtccttcccgtgctccaggtatctgcccagagactccacgcactcctcctccaggtaggccctccatgcgtctgcaacaccagcctgctcccacttgcgccgggtgatctgcgccgccgtgtccgccgccgtcaacgtcctcaggacctcgttcagggcgatgtaatcgtcgccgtcgtaggcctgctgtccatacccgcggaggaggcgcccgtcggaccccacgtgacagccgtacatactctggatggtgtgagagcctggggggggggggacccccatcacccccccccaccgattnnnnnnnnnnagtcgcccgtcccgctccgaggccccgcccacccgcggccccgcccaccccgcaccctctaaaccgaaagggaaaccgggtccggtccccgctctcctcctcctcccggacctcggacttgggacccggggcgaccccggcccgtgcgtagggacgagaaggtcgtgacctccgacccggggtcactcaccgccctcgctctggttgtagtagccgagcgcggtcctcaggttccctcggaaaatctgcgcgttgttcttggcgttccgcgtctgcctctcccaatactccggccccacccgctgcacccacggcgcacgcggctccatcctcggattctcggcgtcgctgtcgaagcgcacgaactccggactttatacccggtgcccgcggacggtggttggttccccgggatcccgacacccaatgggttgagaaccgccaagtcttcatcagtgtccgggcagaaggagctgacacaggtcaggagctggagaagagaaactggggacaggggatccccgcgctgggcgtccccaccccggacctcaccgcctgggactaagactttgtctgaccctgtgctgcggacacagcgcggtttttcccggtgtctctgagcctcccaaggaaaatgctggtcaggttcgtcaggatgaaacctgagagcttgacgtttccagtaaaatactcgcagcacttaaaatgaatgttcacggaaacagatgctgtcgcagtcccggtgagtgcgtggggccgccgtggacactgcatggaggtgactggagttttacagctctggtcaagtccttctgacacactgtgtcatatgtgactctccgtgcaggaagcagtccctactctcctctgcttccactttctacttcagttacgtgtggcttgtatttgtgacacaaatcaaaatgcacagaaacaaaagaattattagtttgattttactcaacacatcattattctgcattatagttacagttcatctcttactgtgttaattcaataaaacaactgtgccatggaagtgtgtggacacaggaaatatggagagtagacagggatctgtgcatctatgtttccatctgtgcatctatgtatccatctgtgcatctatgtatccatctgtgtgtccatctgtgcatctatgtatccatctgtgaatctatgtatctgtctgtgcatctatgtatctatctgtgcatctatgtatctaactgtgcatctatgtatccatctgtgcatctatgtgtccatctgtacatctatgtatctgtctgtgcatctatgtatccatctgtgcatctgtgtatccatctgtgcacctatgtatctatctatagaaaggggattaattagaataactcacaggctgaggtccaactaatccagcctcagacccaagacccttggagttctatagacaggagcctgtggcaactcaggcagccatggtgctcctttaactttatcctatgtgggctcagattagtcctgttttttccccgtttctattgtgctagactctaaggcttctctttcttcttaaaaaggagagaccctggacaggctgaagtgggagggaagatgaggtggggacatcactggctacaggaactttcccgatgttcagaatgtcgtaatctgttacaattagcattcaagtgactgactggagtttgtcttgttcagcagcaattaaaaaccaactcaagagacctggtgagatggctcagaggttaagagcactgactgctcttccagaggtcttgagttcaattcccagcaaccacatggtagctcacagccatccgttatgagatctggtgccctcttctgtgtgcagatatacatggaagcagaatgttgtatacataataaataaacaaagtcttaaaaaaaaaacaacaactcaaggctcaattgcaaagataagcacatacggtgtcttcttcctggaatggggttgtgattcactgtgcacagtaggtccataaaatgaaatctttctgtgttttaaattttatagtgttttgctattttcatttcaggacagtctatttcagtcatcagtgtctgtcctgttccagctgtgacttcactaacaggtgattcaatgttgactaaacaggactgtgccctcagcgtgggtgtcacactccagatgtgtaggagagggagagggagcggagccattacagtacttttcaaaaatgtatttttaatttatatttttattaggtgtgcgtgtgtgtgtgtgtgtgtgtgtgtgtgtgtgtacctgtgtgtgtgtgtttgtgtgtgtgtttgtgtgtgtgtgtgtgtgtgtgtgtgtgtgtgtgtgtgtgtgtgtgtgtgtgtgtgtgtgtgtgtgtgtgtgtgtgtgtgtgcgcaggaagaccaggcactggctcccatggaactggagtcactgatggttgtgaaacacctcgtgtgtgatgggaactgaacctggatcctgtaaacagcaacagtgctcttaattctaagccacctctccagcccctattggaatttcacagaaggaaaccacacagcctggctcacagcaagatggctgacaagatggctgatgacagaacctggatgcaaaggaagagacagagtcagtgcagagcctgagtgagggtgctgggcattgatggatgaggcctgaggagacagagaagggcagaaaaggaggtgacagaataaaggaggaatcctaatggccctgcagggcatctcacattccacactgaatactgtgatgtttgaatgagaagggccacacaggttcagaggttcagatacctcagttctagtcaatggaactgtttggggaggatcaggaggtgtggccttgctggaggaggtgtgttgatgaggagcaagtgagaccagcaagataggttattaactggtaatttattggggagttatactcacaggaggaatcagtaaccagatttggcattccgagaagtctggtcccagatgcttccaaaggctgactgaacccggagagacagggagcctggctcttcctcaccctttatgctacacccttctacatacctgtgaccacgcctagccaggtgtggccatcggtacacatatgggttctctccctacagtgtgtcactggggctgggcattgaggttttaataaactcccactattctccatgtctctgacacttgcagatcaagatgtgagctctcagcctccactcctttcctctgccatcatagactcaaaccctctgaaaacttaagaacaaattaatcgcttcatcttatgtttctggggtaccagtgtcttataacagccataggaaaggaactaaagccaggtgtggtgacaaaaacctttaatctcatgacatgggatgcaaatacaggtggatctctgtgagttcaaggccagcctggtctacacagtaagtttcaggacagccagagtgaaggagactgaccttgtctcaaacacaaaacaaaaacaccaggagagacccaaagcccaaaacaatttatcctctcctcctacttcctcttccttcttttctgaggtcaaaccctggatttttctcaaataaagtcacttccagggatacaatgacaacaacactggggttgggatgcaggagagagatgcttccctttaaagcagaggctctggctggcaaccaccacacagacttccacagagaccaggctcctgtgtccacctgcagggggcgcacacactgccaagcctgatgctcaggaatctcccctttgctcttcactcaggatccagtcttcacagctttgtgcttacactcagactcctggtgtttcttcgaagatgaccatctgtggctccaggtggttgtgtttcacggggatcatcactccatagtcctgagattgtctgtgtggatgggtcatcatctcagcacagtggaccccttctgcactgggaagagaccccgtggatatcaaatacagcaggacacggaacctgtctactctccatatttcctgtgtccacacacttccatggcacagttgctttagtgaattaacacagtaagagatgaactgtaactaactataaagcagaataatgatgtgtggagtaaaatcaaactaataattcttttgtttcagtgcattttgatttgtgtcacaaatacaagccacacattctatgtatccatctgtgcatctgtgtatccatctgtgcacctatgtatctatctatagaaaggggattaattagaataactcacaggctgaggtccaactaatccagcctcagacccaagacccttggagttctatagacaggagcctgtggcaactcaggcagccatggtgctcctttaactttatcctatgtgggctcagattagtcctcattttaagtgctgcgagtattttaccggaatcgtcaagctctcaggtttcatcctgacgaacctgaccagcattggccttgggcggctcagagacaccgggacaaaccgcgctgtgtccccagcacagggtcagacaaagtcttagtcccaggcggtgaggtccggggtggggacgcccagcgcggggatcccctgtccccagtttcacttctccagctcctgacctgtgtcagctccttctgccgacctgagtctgctgttggttcggtggagcgggaggggccggagtattgggaaggggagacgcagagagccaagaacagagagcagattttccgagggaacctgaggaccctgatgggctactacaaccagagcgagggcggtgagtgaccccggctcggaggtcacgaccttcatgtccctacgcacaggccggggtcgccccgagtacctagtccgaggtccgggaggaggatgagagcggggaccgggacccggtttccctttcagtttagaggatgcggggtgggcggggccgcgggtgggaggagttgaccacgggtcccccccccaacctcccaggctctcacaccatccagcggatgttcggctgtgaagtggggtccgcgggtacagtcaggacgcctacgacggcgacgattacatcgtcctgaacgaggacctgaggacgtggacggcggcgcagatcacccggcgcaagtgggagcagactggtgatgcagacagatggagggcctacctggagggcacgtgcgtggagtggctcggcagatacctggagcacgggaaggaccagctgctgcgcacaggtgcaggggccgcgggcatctcctccctctgccctcgggctgggctcagtcctgaggaagaagagaacctcagctggggtcacgcccctgtctctgaggggacacagtgtccctggggctcttgatccagcctggcaggggctgcactcatctcccagggctcagccttctccctggacggttccagatctgtctcaggagggcgggagagaagatgcccacatccccagcagtggctcctcagtctgcagccctgtgtcagccatggcctctgccaggccgggttctctgtccacacccggtgactgagtgtgtcagccttacacaccaggaccggaagtctcctgtacctgatgggagacctggatgtccctaccttaggttgcttccccagtttctagaactttctaaagaatacaatttcccagattcctgtgggtgaggtttgcatctctccatcaccccaattctatctcttcctagaacggtcatgtgagcacttatagggtgccctgaaaaaaatctaaaatatgtctttttcttttatctttctttgtttcttttttgttgttgttattttgcttttgtcagtttttcttcctcgacggggtgattcggtttcaccctcccttttcattatctgtatctgtctcctcaggtgtcttgtaatctggataattagacaagtcagtgttccctttcaaggaaagaatcctataaccttagactattttctgccagaattaactatccaaacccctggtctccctctgccccaacaagttacagtgtttccccactgaattaggagttgaacatcctcagagacggggtcttctgaaaatcaaggactggagagacagggaaacccacacacccctgtgtcccagtgagtgctgcacggggctccacagctatttccagggatcctgggtgacaacaccttgtatcttgttcccccagaggctgagggttaggaagtcattttctctgactggtgtcagaggttcaccccatttctgctgcacactttggtgatggctgttcatttgaagagacaattatgatggtcagcaagatggccacagtggttgagcctcaatggtgtcagcagtagttggtgacaccctttatgtacctgtgcccctaattccttaatttgatatgtatttaaccacatatataaattatttaccatcccttcttccattcttttaccacctaacttatgctacacaacatcacataaggaagaccatgtgatctgctggttcctgagattcccttttatcttctgggtccccaaagaaaatgtgcagatctgtgatgagggggaccagtgccccctgcaggtcactagtgtgatgacagtcagaagtgttcagacacatagttcagtgtcatcattgctttaactttgtctttgcagatgtcagtttaccttgttcttgtgggatttcttaaatcttccacacagatcccccaaaggcacatgtgacccatcattttggacctaaagatgatgtcaccctgaggtgctgggccatgggcttctaccctgctgtcatcaccctgacctggcagagggaggaggaagaacagactcaggacatggagctggtggagaccagaccttctggggatggaaccttccagaagtgggcagctgtggtggtgccttctggggaggagcagaaatacacatgccatgtgtaccatgaggggctgcctgagcccctcaccctgagatggggtaaggagggaggggaacagagctggggtcagggaaagctggagccttctgcagagcctgagcagggtcagggctgagagctggggtcatgaccctcaccttgccttcctgtccttcccttcccagagcctcctcctcagtccactgtcctcatcatggcagtcattgctgttctggttctccttggagttgtgaccatcattggagctgtggtgttttttgtgaggaagaggagaaactcaggtaggcaagggcagggtctgagttctctctcagccattttagaagtgttctctgcctcgtggaaacacatcacaccccatagctcctgggtctgacctgagtctgctgttggttctggaaaattcctagggttgagctcctcctttgtctcttacagcttttcttctcacaggtggaaaaggagggaaatatgctccagctccaggtaagtgtggggagcaggattgtccctgaggcctgtggggtgaagctgtagtaattggggatctggaaatctataatatcacctgcagcaaaatcttctaggggccatctttttatcttcctatgaaagtatatattttatccctaggcagggacagttcccagagcttggatgtgtctctctcagattgtaaagttgacactctgggacctgatttgggatggggggggcaaagtcgacttgattgggtttcagggactaccagaatcaccgtgagtgagtggtgggttgttgggatattgtcttcacaagattgctcatgactcttgttctgtagcgtgaagacagctgcctggcatggaatgacaacgtgttcagccctctcctgtgacatccacggttgactctctgcagcagtgtctgatgttccctgtgatcctatgggctcaatgtgaagaactgggagcccagcccagccctgcacaccaggaccctgtccctgcactgcctgtgttcccttccatggccaacccttcctgttccagcagacaggaggggacatctctatcctgtcacctccatgctgccctgagctgcacccctgacttcccctctgaaaataaggatctcaatatgaacttgattgttctcttccttgatctgataggttgattgtctgttaaataaattgttgagatacttaagagtttgtggaggaaaaaagtgatatcttggagagcctcccagaatctgtgttcattgtgctgtgtccatctaatgggataggatgggattgtaggagctgagtgtgacagggctgtgtccaggtggagctcacccctttgttggctgtgacaaggtcactcctcagctctgtgacctcctggctctgttttctccatcacttaggaccacatgctcagatttgtggtcacagggacacagggatggccagagcaatgtcctgtccccaggattgtgagcagtcagggctactttgacaggtcagcctgggctctgacctggctatagctctttatgccatattccctgttgttgactttttagtttgtatggaggattaggcctttttttgttcctgagagtggagcctgcctccttatcccttgggctccctgcatgacagcattaaaatgtgtttttccatcctttcccaccaggacccacctaggcccctgcactcaggagactgtaggatgagaacatgaacttcagtctcctgagctcctgcctccttccagacccctccctggagattctctcattctttcccatctttcagaatctaacctgggttctaggatgggcagagaggagggatccacagggtctcatctcagatctgtcctgttgggtctgtgttctgcccaaggtctcctccctccttagctctggaagttctgatgctgcctccagtggtgactccaggatttataggctgagtctcctttagatttgtgtttatttaaaagacatgatccagggactgaagagatgactctggggttgaaagcacttgctgctcttgcagaggctccaagctcagatatcaccacccacatggtggctcacagccatccctaattccttttccatggccactaataccctgaacaccagatagactggcaagaaaaacactcatagactaaaattaaggaatcttttaaaaagtagtttgtgggaatgccagagatggaaattacttcatctcctgatccaagttctggcccctgcagttttctattctatccttgtgacttagttccaggtgctctaagagccttagcagagatgtttgctgaccaaggaggtgatcatctctgtcatgatgcacccatctttgtcttgtgagggatgatgacttccagtgccaggaactctgaaaatattcatacccaataagtgtttgatgaatgaattaaaaattaggatcctagatcacaaacagagaggcaggtggggagagggactttgctgaggtgaaagctcaggtgaccctgacctcagtgtgaggggacctgaggctgcacttgacacaccagcacttggcctgaggttgttttaacaaagggagctgctgtagaagagggaagtgatggggtgaatttccctctagactgaaggagcgtccctgctggagccaggaggaggctgatggggctcatgaaacacaagaagctccaggttcacagagctgacacaatgtaacacttccctctcagggttaaaccagctgtggaccaaggagagactcagacttcacagtgcctggaccgctacagcaggtctcaggaaaggtgtctcctcaacggctgcaaggaaaagcagcagccatgctctcctgcaatggcctcactcatactctcctgtgtctgtgtcagcctttaccccaggctcacctagggctcatcacagcttggaggtactcagtgtcatctgtcacccatagttacaaaagatgtcaaaagtacaaccccaacacacacattgttggtacctgtcttctcttttcctgtagcagcttgtgttcctgagggcaagcatctggctgggccattgatgcagtgtctctgcatcggtggtgtgagagttattcctctcacaccaccgcttgacaatggcaccccagaccacacaccccagtcttcacagtggggctctccaggtagcatcagagtagaaggctcagctgttgtcatgagctaagtggtgcaggagctcatgttccctaagtaaaaataaatccacacaccaccaccccctccttccctttaaaagagagtgttcacgttgcaacttttcccttggggagacacacttcagggcttgacttttgcactgattttaactgtaaaatgcagacttaccttctgctcataaaaatggagattaaatctgctggcccctctcattttaacagacctgtgggggacactaatgtttgatatgagttctctgtcagttaagttattggtgaagtaagtgattagtagacattctgtgaaaccaaatattcttggttacaaggaatcccacaaggttggttcccggcccagttctttttttatttttggttttcaagacaatgtttctctgtgtagtcctgactatcctggaacacaatctatagaccaggctggcttcaaactcacagagatccacctgactctgccttccaattgctggattgaagacatccaccactacctggcacagcatcagttcctttggttttttaaagattttattttatttattatgtatacaacattctgcttccatgtatatctgcacaccagaagagggcaccagatctcattacggatggttgtgagccaccatgtggttgctgggaattgaacttgggacctctggaagagcagtcagtggtcttaacctcagagccatctctccagccccctcagcatcagttcttaacacacttgaggacaagaaggtcatcagctacactgtgaattctgctctatcctcagttaacctataatcatgttctcaaactgtcagtagatactgtgctgttggacccatgaattttctaattaaattgtacatgctataatatgatttttacatgaatgatactctgtttaaatgccagtattttactccagttactgtgtaataggtacactgtcactgaatgaactttgaatttaaaaatcaagttagcattggttacatattatccattacaaatttgtacagccttgtatacaggcaagaaaagaaagaatgaaaatggaaaaaaaatcttttttgttaatggaaggtgttaatttaaaaacagcttatccaagctgcctggtgctggtggtggtgcacacctgtaatcccagaactcaggaggcagaggcaagcggatctctgtgagttccaggccagcctgatctgcagagtgagttccaggacagtcagtcacagctgttacacagagaaaccttgcttctgaaaaagaaaattttatccaaactgaatgtgctgcttgtatagtggaactccaaaagctctcttttttaaaacataaatataatcgttgcatttaatgttatttttgaaaacccaaaacatctaaatccttactgttgtaccaaacaatgtcagttcaaattacagaatatgtatatcaacaccagctggaaagagaattcagggcagtataaagccctactaaaatttgtctaattgatgacaattgtttacggagaactgaaccttttttttcccctgaactcagagcagcatgccacaatagacacaaaagagtactagaattattttgtaattatgcacgctgaataaaagcaaaatagacagctgagttcttttaccaaatgctttgttggcatatgatgattgacaaaatattagcatcttcgtttctggactttatgaccacctatagactgcatctttgaaataggaagaaaacagaaagattctgcattcccatgatggtaaagccgtcttactcagtgcaggtgcaatgtacacctagtgcaagatgctccacgcccacaggcgtgttccttttactgacttcttaccatctgcttggatccctcacagaaggacaacactgtcagcattaataattagcagcatgtccaatactcatcttgccttgagtaaagaagcctaacccatctcattggtgtagcaatttccataagatcactacttctctgcatttcttttgagaactcccagagacttcgggaatcttttttaagcaataaaaggtacagagtgggttcaagtcgggcagggcaccctggctcagttcccagtatgaagggactgaatccagtcccctagttctcagcttgcagaaggaggaagttagggggggaaatgcagaaactatcctgttactgagtagcatatgaagggagcaagtggataagagaagacacagtcagcagaaactaggatgtctaaggtggtagggagaaacagtccctgagtgcaattagcatcaattcaagcgtcatcaagaggacatggcaggggacaagctggaaccacagcccttcaagttctcaggcttacagtgctgtggttcaacagcctgtggaaggtggcatgagccagggattccaccaccattgcatgcaaacaggcaaggatagcagcacatggctgccgacccactgagagtgtcgactcaacgctggtggaaatccagtctgttcctgctttcacacctgcagagccacagcttcttttcaaaggcaggggggagcgtttcttcttcgtgaattttttctacccactagagtttcctcgttacttcatcacttacactagaaaagatgctgcaagctgtgtcagctagcttctaatctggccagggcaccaggacgacacgcatgattgagtgaacgaccatgtcttcttggttcttctgatggcagcctcagtatgctcctttggattgaataggtgtggtcttgtttgatcaaagtgtgtaaacaagcatatttgttttgttagtctccatcccagagccctttggagcaccccgaggctctgcagtttgatgactaagttttgcctcacccttgtacagttgctgtggcttggcagcaactgctccagttttgacatcttcctgttggaaataggtctcacctgtgttgccatcaatccccagcacctgaggcaggttaaagtccaggttatagacctcccgctagtaggtgaatccttcgttggctcagatggtctttcagtgtctcaaagggaaattcacactgatcactaggtccacatcacagattctgtcccaggctcctgtctgtactaaggtcccccggaagctgtctagtagccggtgttgtgtgctccaggtctccatttctgacaccattaggcgcgtgatcacatgatctggaaccaaaagacctttttctagatactgttttgctttgtcaccaacttccgtgctggccttgaggttctcctaaaagaagtggctgcttgaaagatgctggaaggtaaagttttgggcaatccttaaatatggtgcccttaccccagcccagaaggcagcctgactataaccatgctcaggagtttggaagccatgtctttggaggggaggaggtggcctggaccacagcaggtacactctgtccaacattccctgcctctgcaccctctgctcacggggattcccctgccacccttttctaccataaaatgattctgctggaaatgctaggttgagagatctggtgaattctacttaatgtaacttctctatagcaaacaattgacttagatttggaacgtgttacagaacacagcgttatcattacctttgtgttttaagtttggatcaccaacatgttcaggtattgtgggttatccctggcttcctggatggcccataacactttatggtaagcagtgtgtttgtatcctgaaaatgctctgaaatccatgcaagtgcctgccctgcaggttcccagcccacacttctcctccaggctctgtgagaggcttgagttgggaaagctttgcactgactttgtttttctccttcttcctcagaccctgctattccttctccatcttctgtgttgtttctctgctgtcttctccgtttgtgactttctacttcctcaggacttctgctccccaggctgcatctccttccccttcccaggcattggtgtgttcttgccaggtgtgtaagtcagatggttctcaagactgaagactaaaaggtacactcttgtaaccactaagctcctgggaaccctgtgctaccatctaggaaaccaaaattaaacggttctctcttgctggtgactatgtcattacagctgacgctatccatgtcctttaaatgtcagttctcggctgttctggagaattctgttgcttttccacatccccattgctccttcaacctttatacttgtgggtgcatctttatgccaggaagtccaagactccacagattggctgcttcgtctgcaagatcatcgtgtaggaacgagaacaatgttgctaggcaagtacaaatattaaataaaggaaaatgaatgatggccatggtaagaatcaaaacatggccgcccctccctgagggtcttgaccagcgggtgtcccccatctattctctagcttcccggtgactgactctggggggagccagctgctgcctgcagagcagcctcaagagagacccagacaagtaggaaaggactcctggggacagtcagcaagaacctgagctctttccagctgccatagaaggaagtcatatctcatgtgggcctggctctaatgaacacagtattcaattcattttatttctattgtaagtattcagggcaaagtcgtagttccctgggctcttgaggaagcccagagcttcacttctccagcctctaacccatgtcttgctgccaggactgtgaattgttggcagttctcacctcccttgggtggagcaatcctgcacaatgattggtggagcaaacctggacaatgattggagaaagatgggtgggaccagtgttacaaagcctgcacagactcagactttccccagaactcatggttcaggccgcctctcctcacacgctgctcttgctgcgggcggccacccaagccccattacagcgtgggtgagtgtggagtcgggagagaaatggcccctgtggggaggcggggagggggggcaccatgaagccttgtccagcatcacccagtcaaatcttcccgccccttccccacccgcgtccggagccccacgcccttctccctttccagccagcacagtccggggaggagggtcggtgtctcactacgcgcgccgcgcccaggcttgcactcgctgcggtatttacacaccatcctgtcccggtccggcctcggggagcccgggttcatggaagtcggctacgtggacaacacgcagttcgtgcgtttcgacagcacagcgacgcggagactctgagcatggagccacgggcgcggtggatggagcaggagggaccagagtattgggatcgggagacacggggagccaagatcaaccagcagacgtttctagagaacctacataccctgtctgcctactacaagcatagtcaccgcgggtcagaagtcaggatgcctccaagtcgccaaggtcaggccccaatcgcccaaggtgccaggtcccaagttctgcccaagacccagtgtagaaactggtttcctattcagtttagaggagatcatgggtggatggggccgtggaacccagctgaccacggggatggggccaggctctcacaccatccaggtgatgtctggctgtgaattggattcaaatggaggcctcctccgtggatatgaacaattcgcctacaacagtgacgattacatctccctgaacgaggacctgagaacttgaacagccgcggacacggaggcagcacagatcaccagggtgaagttggagcaggctggtgaggcagagagatacagggcatacctggagggcgagtgtgtggaaactctcctcagatacccggagaagcggaaggccaccctgtgctcaggtgcaggggccaagggctcagtcctgaggaagaagagacctatctgttggggtaatgtccctgtctcttctcttgtgtttagattttttttaaactttgttacaagaagagttttaaaagaaaaagctacactccaaaattaaccagagcaaagtctatgcctctcagtaaacgtccttacagttagagtagccattctgaaactgtgtgtgttcacactggatcttacccgttcactatcaaatatattttgatgcatttatcaagcaacaacagaaaaaaaaatccttaccagatttagaactagaaaacaattatatttatatcctgcttcttacctcaaatccattacctgcatttaattgtgattttattctgtgcccacttgtacattcgtttactatgtacttaccttcagggctaaatatcacttatgaggaaaatgtggtctttgggaggggggggttgtggtttttctttgtgtgtttcttttagttgattttttctttgttttggatttggtttggctttgtattgagttcccccctcccttgtctccctaaccccagccaagacagggtttctctatgtatccctggagtcactctgtagacaagagacaattctgttcacctgaactcatagagatcctcctgcctctgcctccagggtcctgggttcaaaggcgttccccaccatgacttgtggtttctccatcctgttgcctccaagctgccatgaactgcaggtcctcacttcccactgaaaataaaaatctgaatgtgaacttgatggttcatgtccttgaccgagagactggcagttcaaattaaaggagagaattctgaaagtgtgatggagaaaataaatggctcatggagaaccctccagaatctgtgtctgctgtgctgactgtcaggggggacaggaggagtctctgggagctgagtgaggatggggctaggccaggtggagctcagtccatgggggtttgttgtggtcaccctcagctatgtcctccttgggacttttgtccttgtcactttgtataaccacatgctgacagactctgaccacagggacacagggctggccagagccttgtcctgtccccaggatgatgaacagccagggctgatatgacaagtcagcctgggctccctcatggctgtggctcttcacctggtcttctgtgtttaattcttgtctctggagttcatgtggaggattaggcccatttttcttcctgctaatagggcctttctcagtatcctatggagtccctaaatagtggcaggagcaggtgttttccatccttgtcctctccaggtccagctaggcccctgcactcaggagactgtgggctgagatgatcttcagtcccctgagctcctgcctccttccagagctgttgcttggaggttctcctgccccaccatctttcagaacctaactcctgtctgtaggatcagcagaggggatgggtccacagggtctcaacttggaacaggtcctgtggggcctgtgtcctgctctgcttcattcacaacatgacacacagcctcactcagaaaacatgcatggcaggttcccaaggtcatatctcaagtttctggtcctgcgggaaaacagctacaggtggttctgtgtaggattctccctctcacaccaacacgtgctaaaggcattccagctttgacaccatctccacagtggtgtgctccagtgaaaggtcgtgttagatttagaaggctcagctgcagtcatgagctaagtggtacaggggttcaaattctgtaagtaaaaatacttccacacactaaccccagccctctgtttttgttgttgttttgttgtttcagatttacttattatacatacagtgttctgcctgcatgtatccctgcaggccagaagagggcaccagctctccttacagatggttgtgagccaccacgtggtttctgggacttgaactcaggacctctggaagagcagccagtgctcttaacctctgagcctctccctgtccctctctccctctcctcttcttcctccccctcgctctccccatttcccttcctctccctttccctctccctctctctacagagttttaacattagaacttttctctaggggagtaatacatcagggcttgacttttgccctagttttaactgtaaaatacagacttaccttctgctcataaaaaaggagatgaaagctgctgccccctctcattttaattgacctgtggggacactagtgtgtgcagtgagatctctgccagtgatgttattggtcaagtaagtgatcagtaggcattctgtgaaaccagagagtctttcttggttatgaggagttccaagggcttggctctcagcatcagttcttaaggaacttaatgaaaagagcatctcagcctccctgtgaactctgctctgtcgtcagtaacctacaatcaggctctcaagctgtcatgagatactgtgctgttgggaatggtgaattttctaaacaaactttacatgctataacatgatttttacaacctagtacattgttttactacaatttcaatataaatgtacattgtttttgagtgaccttccattttaaaattaaattacttttagttatgtactatattttgtaaacaaatatgagtttgtataaaggcaaaaaacaagactttttaaatggcagacaataatttaaaaaacaacatataggaattaaattaaatgtgctgctggagaggctactctgactattttatgggctttcggaaaactactccccacactgggtcgccttgtccagccttaatatatggggaggtgcttagtcttaatgcaacttgatatgccatgttttagtgatactcatgggaggcctgccctttcctggatggaggcagaagaggaaaggatgagggagatctgggggagatgagggaagggactggaaggggaggatggggaaggctgtggttgctatgaaaaataaataagaaataaattaaaaatgtgctgctggtctactgggaattccctagctttctttagtcctggcttggaaacatatatgtcaaatttctgtaacctgtcttcagccaagaattttgctaactcatatctgtttacagtttgtataaagtaaaacaggagtgtgtaactgcagcctggtctccagagcgagtgccaggataggctccaaagctccacagggaaaccctgtctcgaaaccccccccaaaaaaaagaaagaaagaaagaaagaaagaaagaaagaaagagagtgtgtaactgccctgagcaagatggttttgctcattttatgtgatgcttgccaaaataaatgataaatggcttaaatttaaagaagagctttattacaaagatgctgtcaagaacactcttatgcgggcagtggtggcacactgatcccaggcttctcagcaacttctcacctcacccctccccaaacctctccagcccctgagctttgcttccctccccagcttctatttcctctacaacccagccatttggccatgtgctttccattttggctccactccaggtgctcttgacctctttggctcttctccctctcctggttccctctcttgtacctctctcttcttctctcactcttcctgtcccctcctctcatggaccagtggtttttgttagttggttgattggttggctgattgcttgattgcttgattgcttgattgattggtttttcaagacaaagtttctctatataacagctctagctgtcctggaacttactctgtagaccaggcagtcctcgaactcacagagatccacatgcaactgcctcctaagtgctgggattaaaggtgtgtgctaccacctcccagtggtctagtgtattctgatggccatgttcaggctggactcttccaaaggcctctggctgttctctcccttacatcttccataagagtcttctcaacggcccaggagtggtcatgtcctcattgtcattcactgccatccacaaccatttagctattagactttcacagtccactgtgaccagtttctcacacaaggaagcagtgctgggctccttccgatgaccctccttaacaaccagcctggctattcaccttcccctggtcagtccatcaaatgctaaggtcagtgaagggactctgctcaagttattagggttccccttcagctctctttaatctgagggactgtcctaatcaggacaaatcttaaaaaaaaccaggtccttctgtgcccacacccacagtgtaataattctatgtgggagatttccttcactgatcatagcaaagagctctgggtccataaagagttaccagaagtccctctctgctccttcctgactgccagcaaagacagggacctcaacctggaactgagaagcagaacccttctgcaagttccctgtgggcttggagaaccctaaggtgcaattgagacacagcctccccggagtctccatagcgcttgctgaacaactttgcaggtttattgagaaaacatatctcgctggtcctttaattccagctctgagtaaacagaagcagttggatctctgtgagctagaggccagcctggtacatagagcaaatttcaggacagccaagggctacacagagaaaccctgtttccaactcccaagaaaaagcaagagaagaagagacacagagagacagagaaacacagagagccagagaggcagacactcgggccacaggggagaaagagagagagacctatctccccactaaattcccagaccagctctctgttgtcctcacaccccctgtcatttgttttcttctggaagagtccttgtcccaggagggggtggagtgcatctccacagcattgaattagagagggcctgagaatagcctgcagtctcccctggattccacacacacacagcctctgaacaggactttgagaagacaggttgaccaacaggcgctctttcagggaagtcacagcagtctgaggggggccacgggtcgatctgcctgagtttcactttcaacctctggtgagattttctgcccagacgttgatgacgcgacaccgattctcactctcatttggagttgggctctgagataatccaatcactgtcgctctggtttgtaaatttgcccaagatctgcccagaaccagactctcagtgtccccaaggatgggggccactgtgcaccctgctctcctcctgctgcttgcagaccctgtgttctgggctccaacccgcgcaggtgagtgccacccaggggaaaaatggcctcggcggcaaggggtgggggcggcacccgggaagccgcatcttccaaactctcagccagaactttcagatccattctccacctgcatccctagacccgtgccctgctcccttaccagcccggtgcacctgccaagaggtgcgggtctcaccgctcaccgcccccaggctcacactcgctgctgtatttctacaccaccgtgtcccggcccggcctcggggatccccggttcattttcgtgggctacgtggacgacacgcagttcgtgcgcttcgacagcgacgcggagacgcccagagtggagccctgtgtagggtggatggaacaggagaggcctgagtattgggagctgcagacccagatggcctggactcaagcaaagctgtccggtgggagcctgatgaccctgcttcgctatttcaaccagagcaaggacggtgagtgacccagacactttgggagcaccaaggttgtccagattcactggactggagtatcaccctagacctgcccggttcgttaagcagaaaagggcccgcagggattcgcttggacttggtctgaagttagtggtgctgcgcttcctaagagggctgaccaccttgtccccgctagactctcacacgctgcaggggatgcgtggttgcgacgtgggggcagatggacgcctgctccacgggtacaaccagctgggctatgatggagaagattacctcaccctgaacgaggacttgagctcctggacagcgaccttaggtcagatctctcagggcaagttaggagaccacttgaaggacagctgcgtggagacgctgcacaaacacctggaaaaagggaaggaagtgctgctgcgctcaggtgcccggggagccacaccccgcccaagtttccctctggctgcttgctgggagtttagagagctgggggtgcctgcatgggcaggatgagagcacttggggatagctcacaggttgagtgctgcccagcaggacaggttctgggttagagcctttccttttccggagggggaggagagggaggcaggtgaaccagagggccttagctcactcctccccagagtccaaggaggcaggagacaacttggttccaaatctttgaccaagaatgaatccctcagaggacagcccttctcttactgccagtaaagaaattcattttccctaacagtagaccaaccttttagtaactgatcaacagttcctttacttgggcaatggacctggacccataggaggttttttctctcaggcctcctccagtgtatctggagtctggatcctgcttttctgagtctcctggccctccctcagctcaggaccagaaaactcctcccatccatcagtctgcagagccctgaagccccctaccctagagcaccccaaagaacagattacccccagtgcctgctctacttggggtctattaatatatggacacctaatcccaccccagttctgctgtccattcctagaatggtcacatgaacactgctgagtccccaggaaaaagccagatgcctgatcttcccaactctccccctcagaccccccaaaggcacatgtgacccatcatcctggatataaaggtgatgtcaccctgaggtgctgggctctgggcttctatcctgctgagatttccctgacctggcagttggatggggaggacctgatccaggaaatggagtttgtggaaaccagaccagcaggggatggaaacttccagaagtgggcagccgtggtggtgccttctggggaggaacagaaatacacatgccatgtgcaccatgaggggctgcctgagcccctcaccctgagatggggtaaggaggaagtgggtgcagagctggaggcagctgtagtcagagcttagaactgggtggtcctcatctccccctcctttcccagagcctccttggaacaagaaatattggtttctcctccttatcctcatcctcatcacagtttgggtgctttgcatatgtaagaagaaggatgcaggtaggatgctgagtttacttgtcccactgagggcttcaagccataggtggcagtgtcctgcctaggtaatgggatgtaccatccacagctctgtgtctccttcatttgtgacctttttgtttaggcttcaaaagtagagaagggaagatttgcttgggggatggttctggtgactgagatctcatgtccagctgtcgcaagcagaggtctcactaaggacaaacctccaggaagctattacaatgtctcagttctcgaaatttcccttgggctagggactaaggttcccaaccctttggaggtcacattaagatatccttcgtatcagacttgcattatgattcatagaagcaaaatgacagttacgaagcagcaacacaataattttatggccggtggctcaccacagcatgaggagctgtgtttaagggtggcagcatgaggaagtgcctgctcccatgatacccatacatggatttctttcctcaggtgggagaggaaggagccacactcaggaagaaggtaagtgtggtgagaggtggtgtctgagactcttggagtccatgagagctcacccagcccatagtcccccctcaacctccagtcttctgaagcctgaccaggtcctgctctgttctttcctaggcaggaacagtggccaggactctggtgagacggccgtggatgatgaggtgatatgtggggaaagacagacgacacaggttggggctggagagagtctttgcactcagacatttagagtgaggaggaagctattcagaatgtcaccactataccgtgacatctgccttaatcttgtaggagatggtcattctctctggggagcctgagccctctcggaatcgtccagaccactccttcagactgagtgatctgtcattctgaaaaggtatctgattgtcctccctctactctgtggcactcagaagtctctgcttagtcttctcgctcagggacacccccacttccccgccctctcccacacccaactccatgtggaagtgcctggaacagctactacagaatggaatcttttgttttgttttggtgacagggtttctccatgattcagtcctggctgccctgtaactcactctgtagcccaggatggcctcgaacccacagagatccacctgcctctgcctgccaagtgctgggattaaaggcatgtgccaccaccatacagctcagaatggaatcttctgttttgtatatcaccagacatcttcacagtcaacttgactggacttagaatcacctagaagccgcccctctggatgtgtctgtgagggtgtttctagccaggtttaacccaggaggaagaaacaggttgactgtaaggtagcttcactcacagctggagtctgaagagaaagccagcaggacactggagtcccccttcctgtgtttcctaacaggacatgagcaggccatctcctgccaccatgaacagagacaggtcccacttttctgtcttgaacatctgacacctgtctcttccctaagtggcttctcatcaggtattttttgtcgcagggcacagggttagacacaaagctccttccccacatccaaggcttcctgagcatcactccctaatcttttagagactttcactcaggccaaactgggatctatggctttggtgcggaaaaggattatggactactagagctggtgtttaataaacatgtttctatttgtttttaattttaaggtggcataaatccatttatttattgtgtgtgcatgcgcgtgtgagagaaccacagctcatgtatgcaagccacaggacaactagctgtagtctgttctcttcttccaccatgtaatccagggacggcactcggggatgacacacctggaggcaagtgacttcacccactgagtcatctagctgtcccaataagggtctgatcatttatgtgttactttcaagaggcttacattaagtagaaactctcagagaacacagcctgcatctctcgtgggtctcttcctggcattttcccccaggtttcccttcattctctctgccaaaagtttaagatgttctgaaacctcatcctcattttccttagcgcgttgtttctccagaacagtccatctgtgtctgtgttacaggatcgcatggagtaacaggtgctgaatcttggttgtgttggtcctgggcttctcacattctttatgtacattctgacaatgtattggccaacgtcaccagcttctttagaaagattgaaaagctttcagattctgcagctctcttgaaccacacccactacaaccatctacaatgagacctggtttatcccagcactgtccccactcatgatgctggatgtctgcggttgttagtttttgtcatcgctgttaccggatacccaacaaaagcgacttaagggaagaaaggcttattttggctggttccaggagatacaggccatcatggatgggacagcatggtgtcagggacagaaggtggccggtacagcgcagtcaccatcaggaaagccaggggttgagttctttgtgcagctctctctctctctctctctctctctctctctctctctttctctctctctctctctctctttctctctctctctctctctctctggggaatggtgctacacttattcccaccacctcaattaacctaatctggaacctctgtcacagacagatttgtgtcttaggtgattactgacaccccctcccagttctcccttcttttcttttctttttaatgacatttatttattatgtatatagtgtgttgttgacatatatctgcacaccagaagagggcaccagatctcattataaatggttgtgagccaccatgtggttgctgggaattgaactcaggacccctggaagagcagtcagtgctcttaacccctgagccatttctccagcccctctcccttcttttcaatgtgcccctttcccctgttcctagactaggcttataccatttgaccctgcttggttttctcctttccaggaggaacatcaatttaagtccagctcagactacattaaaagaacctgtttcaaatattaatgattaactaaatcaattaaacctcctgaatgattcattattatggaccttattggaaaagagacccaacagtgttggaggcaagtctatcgcatgcctgcagtgcccaggaggccagaagagggagttacaggcagttgggagctgctctgtgggtgctagggatcgaaccctgcccctctgcaagagtatcaagtgctcttaaatgctgagttctcgctccaccctcaaactcagtgggtttttttttaatatttattatttattttaatgtataagtgctctttctgcatgtatgcctgcaggtcagaagagggcaccagattccttacagatggtgtgggccactatgtggttgctggaaattgaactcagacctctgaaagagcagccttaaccactgagtcagctctccagtgcaccgccccccccccccgggggtttttaaaaataaaaaaaaaaaaaacnnnnnnnnnnnnnnnnnnnnnnnnnnngggtcaagttataattaaccatctaattatacttatgtggttatactgtaatatataagattccatggaacagagtatttaaaagaatcctcctgccgggcgctggtggcgcatgcctttaatcccagcacttgggaggcagaagcaggcggatctctgtgagttcgaggccagcctggtctccagagcgagtgccaggataggctccaaagctacacagagaaaccctgactccaaaaaccaaaaataaaaataaaaataaaaagaatcctcccacagaccggagaggtggctcagcatatacctagttcttacaaataacctgaggttgggatccagcacttacaaggagttcacagtcacctctgactccagctccaggaaatcttctgtcctcctcgggcactgcgctcatattcacacacaaaaacacacaaacataattctaaaacaaattaaaagaaacagagcttacatagactctacaccaacactcagaaaaacactgtgcccaagtgctacaagagccaggggacatgggtcaggttgaagtcccaggtcttgtaaggctcttaaccgtattttctttaataaagacgtcagagaggtgccagcactggttttccatacaaggtttcactttctctctcaactctggccggattcttctctccggacacaaatgatgcactcacaattctcattcttgttggttgtctagtttctaaagaagccaatcagcgacactgtttgctacgtacaagcagtcaacaggaacaaagttcacactttcctaggcccccggtaatgtggaccatggcttctgtttccaggctccagctcctcctgactcaagttgccctagttctgatccagacacaagcgagtgagtaagggagggacgggggagcgaaaagggctccgcgggaaggatcaggacgccaggtggggcaacaataccggaagcgaatctcctcacccctgtatctccgcgtccctcacccctgtatcccctgtcttctcgggggaccctgagcccgggaggagggtcggggtctcaccgcgcgccgcccccaggctcgcactcgctgcggtatttctccaccatcgtctcccggcccggcctcggggagccccggttcatctatgtcggctacgtggacgacaggcagatcgtgcgctacgacagcgacgccgagaatccgaggatggagccgcgggcgccgtggatggagcgggaggggccggggtattgggaaagggagacgcggaaagccaaggacacagggaagaacttcagatcgaacctcaagaccctgctcggctactacaaccagagtgacgatggtgagtggccgcggccaggatcacacacaggacccctccacgtccccggggaccgtcctgggtcatcgtgacccgctgctgggccgaaggttcatccaaacgcctgcccggagcctcaaacgggaaagaccccgccgtgtcgcttagggtttttcggttgcacttttgtttctgaaaggtcgggtagcgcacggacagtggggcgggatgacaggcagggggggggggcccnnnnnnnnnnnnnnnnnnnnnnnnnnnnnncgctgcagtggatgtacgggtgcgacgtcgggccggacgggcgcctgctccgcgggtattgtcaggaggcctacgacggccacgattacatctccttaaacgaggacctgcgctcctggaccgcaaatgacctggcctctcagatctctaagcagaagtcagagaacgtagacgaggcccaccaccagagggcctacctgcagggcccgtgcatagagtggctgctgaagtacctggagttggggaagtcgactctgctgctctcaggtacctggagactcctccccgctttccctccggagtgtgggcataaggcttggacatgctcagaggatgaactgtccagcaggcgctggactgagggagaaggagagggagactccgggttgtttttctcctagggagactaatcctttcacagcacgtcagccttgatgatggccctggacccacaggagcttttttctctcaggcctcctccagtgtttctggagtctggctccagcttttctgagtctcctggccctccctcagctcaggaccagaaatcccttcccttccatcagtctgcagagccctgaagccccctaccccatgctgtcacacccatatcctagagcaccccaaagaacagattaaccccagtgcctgctctacttggggtctattaatatatgggcaccctaatcccaccccagttctgctgtccattcccagaacggtcacgtgaacactgctgaatccccaggaaaaagccagatgcctgatcttcccaactctccccctcagaccccccaaaggcatatgtgacccatcatcctggatataaaggtgatgtcaccctgaggtgctgggccatgggcttctaccctgctgacatcaccctgacctggcagagggaggaggaagaacagactcaggacatggagctggtggagaccagaccttctggggatggaaccttccagaagtgggcagctgtggtggtgccttctggggaggagcagaaatacacatgccatgtgcaccatgaggggctgcctgagcccctcaccctgagatggggtaaggagggaggggtgcagagctggggtcagggaaagctggagccttctgcagagcctgagcagggtcagggctgagagctggggtcatgaccctcaccttcccttcctgtccttcccttcccagagcctcctcctcagtccactgttcccatcatggcagtcattgctgctctggttctccttggagttgtgaccatcattggagctgtggtgttctttgtgaggaagaggagaaactcaggtaggaaagggcagggtctgagttctctctcagccattttagaagtgttctctgcctcgtggaaacacacatacaccccattgctcctgtctctaacctgggtctgctgtcagttctggaaacttcctagggtgagggacttccctggtctcttacagcttttcttctcacaggtggaaaaggaggctatgaccattttgtaggtaagtgtggggaggaaaattgtcccttagggtggagctggagctgatggggagcccttccagccacatgctctcagtctcctaaatgcttggtcatttcttcttctgcaggcagggtcagtgccgagagctctgatgtgtctctgtaggtttaaaaaggtgactccctggggacttgggattggggttgaggcagaggggagaggactgggtcccagggcttctcagattttgacatttaatgagtcttggtgggactctgagatgttgttatattggctattcatgactcttaatctttagcttccgacagctgcctcctggggacaggttctgactcaagaaacaacaaatgtctgaagctgtctgctttctcctgtgaggacgatgaaagatctggggagcccagcttgcctaacagcatgctgaccctgggatttatcagaagagtgacttcttagtgtatgtcgttgtggtgaacataaacatgcttccacagccagtgctttagctaaggcttcggcaaattcaaaatacaccagttcccaggatcagaaatgaaatagtgttagtgctgctttcccacctgcaaaaaaacaaacctggcagataacattaaaaacattactccctgtctcaataactggctttctgcatgtgtttctaaccttatttttatattatgaaattcaaggttaaactaactgtttgtgcagagtagaagagtgtatcttaagatctagggctctcgggggctggagagatggctcagaggttaagagcactgactgctcctccagaggtcctgagttcaattcccagcaaccacatggtggctcacaaccatccattatgagatctggtgccctcttctggtgtgccctcttcatgtgatatacatggaagcagaatgttgtatacataataaataaaatctttaaaaaaaaaaatctagggctctctctaggccactgtctcttgccctgtgtctttctgcctgctttgaagattatacatcagggaagccaactgacacccaagcattgccatgattttatggtggatgtggttttttcaattagagcgaactctaattggcctttataaaaacccagaatcagatataatggtgaaagctgaatgatcagagaagcagagcagccagccactggttcttacctctactgaatcctcagaccaaagggaagatcctgtccctatgaaccctcagagtgaatgctgtcttgacggaaaaccttgtgatttcttatgtgtttatagaagggctctctctgtctctattgtttatttaagaaatggaatatgaccttcagtatgcagctcttacattggctagggttcttcggtagagagaatttttaaagaatccagtaataaacaaagttactttcagatgtgagcctgtcttttcactaaaggcctttttagatagataagaatttttccctaaaccttccctatcgtgacccagcatgtctcagccttagtccatgaggttctatctgagtgggggtgtgtggactggaagctccaagcaacccaacgtcaataaagaccaaacacaggcatcttgtcatctttagagagctctcaattccatgttgtggaactagagtcatttctttattagccatcttttctggtgtttcttaaccatcctgcaaataacacgaggcaaccatttctctctttgctctcctctctgctctggccacttgcctcttcactcctaaccttctgtcttcccaagttactcatacctctggctcctccgcccaggtgagggactattcagatgcttaggcacatacagatgcaaataagaggcatattaccctgagactatggtaaacagtaacagcctattgttaattaacaatacaaatgactgcacctgtcttagggggttcccttcaacctaccaggggtgccccgtcatggaatcacgcattccatcatgcgtgttctgtcttaggaattccctgaaggcaatgaaaaccgtaaccatctttggctggaaccagcctctgtaaaacaaataagtttagtgggggatgggccacggtcccactccaagccttatgaatcagcaagaaacctccagaatagcatcttagctcttatggctgcaaaccttctcctgcggatgaagacatttaaaggttaaaaatggcctttttaaaatctctgtggcaatgcctctaatgcttcttattaaagtttgctccctaaaacatacttctatcctaaggcttgtaaactgcatgttacatattctgtaagaatgaattctgacttctagtttctaataacatctgtataacacatatagcaagattacaaacattaacaattccatcatgaannnnnnnnnnnnnnnnnnnnnnnnnnnnnnnnnnnnnnnnnnnnnnnnnnnnnnnnnnnnnnnnnnnnnnnnnnnnnnnnnnnnnnnnnnnnnnnnnnnnnnnnnnnnnnnnnnnnnnnnnnnnnnnnnnnnnnnnnnctgggactcaatgccccttcaaacttttctatcacttgctcagagtccaaagttccaacatcaggtttgcagtatcagtctttgaaagttaactaaaaagtcttttgtccgtgtcttgtttaaacattgtgagggagcttctgccaccctggttcatgccagtatccgactgtcctaaatgggtcctttctcccaatgggaaaactggcaaaacagttttgtgtgtctgcttgtggcaagaaagcaagctgtgtgttgtcgagttcttagcctgctccggaatgagcactcacggattcagagaggtgaatgtagtccgtctgtagggaagctggaaactgggtgtgtctcccttcttcctccggctgtaggtcggatgtcctcaaggttcaggaaatacaggtccagtgtttcactccagctggttcagacggtctcctgtgggcccaggtcccatttttctcagttccatgaatctcaccaatctttccggtagccagtgtacctcgttctcctcctgcaagcaaacacagacatgccctcgacccccaaataattacggggtctggtcccctctattcatctctccatttgacctgagcgaaatttgctcgagttccttcatgccagaatctgtctgcatcagattgctcactggcatccatatttaaaaagtttaagataaacagtgcattctttaatgtggagactgggggcacagctccctcctttttatcttagaagctgtgcttttagggcattatgggcccgctctattattccttgtccttggggattataaggaatacctgttttgtgatcaatttttcattaagcacaaaataagctggaaagctttgttaatatatccagacccattatctgtttttataacttttggcactcccatgtaagcaaaacatcttaaacagtgacttacaacatgccttgtggtttctcctgtttgtggagtggcatatttttaacttgccaaactctgtaatgtgagtcacatccattcaccataaatggttggggagcaggccttgaggattcacccttaaattagccatagccatattgtggacatattccatattgtttgatgatttgaccagcagtctctctggttaagccaaatttcttacttagacttttgctattatgataaagaaagttacaagcctgtcgagctttttctatttgaggcaaatcaaccaattttgttaatcagttaatttattccctttggctagtaatcagggaaaggcctatttaataggttcccaatgtgatccataaacatggtaatactcttaggtgaataacattttgaatttgctcaaataatattttaatctaatactggaccctatgtatggaattgtctctattatctcaagagccttaaagacatagtgaccgtcaatatataaatttaaattaattatttaccagaatctgaaaggccattgcaacagcttgtagtttgatcatttgagctgaagccagagctgtctgctctatctattcctttctattaataatactctcccaatagaaccattggtaaaaatttaacatagcatatttttacaggactgctttttataattttggaaatataaaaggatgcattagtgtaaattttaacagtccatgagctagaaattgattatcaattcttcctgaaaactgagcaaagacaatcgcctaacatattacattttactactttatcacctgactgaccatttcagtctcacacgcttagtgtcggagacatgtatcatacttggttttctcctaaaatattttctaaaatctatatggcatttctgtaccatgtaggctaatgctttaaaacaagggtttaaaatatttaggctggtgaaccatagtaatggttccttctgccataaaccagaagtcggactatgctttgtggggagtacataagtttcccatggttttgcatagtcaatatatgtgaagatgctgaatcacctcttctaattatagaacttgtctatctttctagttagctgtctgggtacatttggatccttatctccttatagaatcttagttaaaggatttaaatcattagatgtcctgaaaaaggtacttaaccaatgaatattttataacaatttctaaaaaactcatttaaagattttaaactagtttttcaattgttatctattaagccttaatttctttagaatacaacatatgtttttaacaattttttagatttatttaagtttctgagtagccttttctaatctaaccttcgaagctgacaagctaagacctcatttgcatcttagctgacctgatttaatctgcatctgcaaagacataatcaagctgtgaacctaacaggttggctctctcctgaggcttttcataaaccctttttaaaatcatgtaccaatttttattttctagatttccgtttttaaccataaaaatttagtaagacctgtgtcctctcatctgccaaattttacagaatcatccatagattcctcgtgtctctaagctataggcttttgttaaccttttaattgactatctcctagggctgaaatcatattttttcctgttaagacattgactgactgactggatgctctttttggcaatgttaaagtgattttgatattttttcaaacaatatccgaagcaatgtaaatatctctaatcatatctaaggcaatttaggcatttccattcatccgcattcataaattcacaatcacatcacgcctccaggtgtggccacaccgttcattcataacttgcatacgtctcacatttctccttttgcctaggttatgatcagtttgttgaaaagaaaaatccctagttgaaatttctcctaaaatccttgaaatatgagcattcaagatttgaacaattctaagcttaaatatgttgccctttcttctttataagtctcaaaaacagtttctgtctggctgtatcaatagcatttatatnnnnnnnnnnnnnnnnnnnnnnnnnnnnnnnnnnnnnnnnnnnnnnnnnnnnnnnnnnnnnnnnnnnnnnnnnnnnnnnnnnnnnnnnnnnnnnnnnnnnnnnnnnnnnnnnnnnnnnnnnnnnnnnnnnnnnnnnnnnnnnnnnnnnnnnnnnnnnnnnnnnnnnnnnnnnnnnnnnnnnnnnnnnnnnnnnnnnnnnnnnnnnnnnnnnnnnnnnnnnnnnnnnnnnnnnnnnnnnnnnnnnnnnnnnnnnnnnnnnnnnnnnnnnnnnnnnnnnnnnnnnnnnnnnnnnnnnnnnnnnnnnnnnnnnnnnnnnnnnnnnnnnnnnnnnnnnnnnnnnnnnnnnnnnnnnnnnnnnnnnnnnnnnnnnnnnnnnnnnnnnnnnnnnnnnnnnnnnnnnnnnnnnnnnnnnnnnnnnnnnnnnnnnnnnnnnnnnnnnnnnnnnnnnnnnnnnnnnnnnnnnnnnntccaagtaaataaatatacaatcatctgactaacaactacctgcctgatttctctaactatgtatatttttacttttaaggccagcttacttctctttaccatctagctaatatttctatttcatatttacaattacctgcatttttcattccggagtttaacatattacattttactactttatcacctgactgaccatttcagtctcacacctactgtgtgcattttctctcattttaagggttagataacccgctttacctattctcatcagctgctggctgacattctctcatttgcccatcttcatcactttaagggttaaataacccgctttattttttttttttttttgtcagctgctggctgacattttcattttatatatattttgtgcacatttctgctttaagggttaaataacccgctttatttttttttttgtcagctgctggctgacgtcttcttattttatattgcatatatctgtttcctatttctaccattatatacagttttattcctgacttaacgctgttcattcaccacattcggccacttctttcttctttttcctgcgagtgcttcttccccaaccggttcgcccgcgacgactatgtctccgaagtgtccaagactctgccttgcccgtttcttcgtggtgtccatggcttcttccccgttctcaggcccacgttgggcaccattttgtcgtggcccagcatgtctcagccttagtccatgaagttctatctgagtggggggtgtggacctggaagctccaagcaacccaacggcgataaagaccaaacacaggcatcatcttgtcatctctagagagctctcaattccatgttgtggaactagagtcatttctttattagccatcttttctggtgtttcttaaccatcctgcaaataacacgaggcaaccatttctctctttgctctcctctctgctctggccccttgcctctcctctcctaaccttctgtcttcccaagttactcatacctctcgctcctcctcccaggtgagggcctattcagatgcttaggcacatacagatgcaaataagaggcatattaccctgaggctatggtaaacagtaacagcctattgttagttaacaatacaatggtgacccggagcttcctggcgccaatggcagccaaagcctgggacccaaaatattccataacagagatattcagtcccccacacttccctactctgaggatttctttttcgtgccctggagcggatctgggagctggccttccatgtcctcatcatttcctgttgtttctgtgtcaagtggaaatagtttgcagcaatgtaatgcaacagtgttctgcagtgacagcgaccattgcacagatgtttgagtgctgagtgtgggacatgctttcattattgcaggcagaccatactgtgagccaaccatacctcttttggtaatgcctgtcttttataaaagggaaggggggctaaagagatggcatgaatagggcacactttgtccaactctggtggctattaatcaatagctacctagtttccttaatgcccacaccaggccattagaaggactgtggtgccaggtggctagagagatagctcagtggttgcctgctgctcttccaggggacctgagtgcaactccagcacctacatcaggggttcacaactacctgtaatcccagctccaggggacctgataccctcttctgggctttgtgaacacctgcactcatatgaacacacacacacacacacacacacacacacacacacactgggccgctgaaaaatctgcgaggctggcctcaaactaacagagatatatctgtctttgcctccccagtctgggactaaaggtgtacaccaccaccagccaggatatttttttttttaagatttatttattgtgtatacaacatcctgcccccatgtctgcctgcaccccggaagagggcaccagatctcattaaggatggttgtgagccaccatgtggttgctgggaattgaactcagaacctctgacccaggatatttttacatggccttggacttctggatataaaacaggtatacaaatcaaacactaataatttactttaaaactaattgcttggggctggagagatggctcagaggttaacagcactgattgctcttccagagatcctgagttcaattcccagcacccacatggtggctcacaaccatctgtaacgagatctggtgcgctcttctggcctgcagacatagatgcaggcagaacactgtgtacatactaaataaacaaatcttaaaaaaaaaactaattgcttggtatacttatataatttttaccacttattaaagattaaaacaaatttgtacatggaaatgcttattttaaagaatttaaacttagcagggtgtggtggtacattcctgcagtcctagtaattggaaagacacaaggatcaggagttgaaagccatccttacctatatagcaagttcaaggctacctctctcaaaacacgcagagggtagggcagggtggggtattaagtctctgccaatgtatttggccctgaagagcatcttcagtgtttttcgtagttattgatagcttgattttatatagtcatccatactgaaaatgccactgcatataaatgcatgatacggaatttcaaaactatgtcttaaccccaaaccaaagttcatttcacaagttgttgtgcttattttttgaaacagggtctcatgcagcccaggttggccttgaacttgctctgtagcaatccctattttctgcagtgctgccaatgataatcagggttccctgtgttctgggcaagcgctctactaactcatttaattctaaactggagcagttttttgtttttttcatgagattcaagttagcagctcaaacaccagtcttttgtggtagtttggttttgtttttgtttttcaagacagtgtttttctctgtttccccggctgtcctggaactcactttgtagaccaggctggcctccaacacacagagatccaccagcctctgccttccaagtgctgggatcaaaggtgtgcgcccccccccccccaactggaacactaagttttaaagatttttctttctattttgtgtgagtgcatgtgcgtatgtttgtctgtatgccacctgtgtgtctggtgctgttggaggccagaaaagggtatcaggtccctggaattggagttacagacagttgtgagccagcatgaggtggcaggaactgaacccaggtcctctacaagagcagcccgtgctctcaacggctgagccatctctttggcctttcaaataccaacttttaaaaccaaacattctaatataatgcaatacacttgaacttgaggaaaacattgtctttattttctgtgattaaaccacatctctataagtgcataaaacatcatgtacaatctcaaacactgcaattcctgacatacggtagcctcaaatcactatgctcagttaacttccttatacagcctgggatttccatcctaggtaaaggtgctttccacaatgggcagagccatcctacaccaactaactagaaaacccccctcacccgacaaaagaaagaaaatccccaccccaccgacattgccacaggtcaacctgatgtaggtaactcctcagttgagattctcttccccagtgattctgggtggtgtccagttggcatttaacgttaaccaggactcgatgagagggggtgggtattataacctcctccacagcacgccagctcacaccacacattccaatatcctgcagacccaccacacgggtttcccacagatacatacaaatttccccatgatcttttcttttcttcgctttttgagacagggtttttctgcgtagccatggctgtcctggaactcactctgtagaccaggctggccttgaactctgagctctgcctgcctctacctcctgagtgctgagattagaggtgtgtgcatcccctctgcttgacttcccatcatcttcttcttcttctttttttggttttccgagacagggtttctctgtgtagctttggagcctaccctggcactcgctctggagaccaggctggcctcgaactcacagagatccacctgcctctgcctccagagtgctgggattaaaggcgtgtgccaccaacgcccggccccatcatcttaatagatcagaaggggatactttggggttaccaaactcccttgtagccattgttaagtcccctgtctgcctgcatggtggattatagatatttctcttctctcaattaggagttaaacttctggggctggagagatggctcagaggttaagagcactggctgctgttccagaggtcctgagttcaattcccagcaacacatggtggctcacaaccatctataataagatctggtgccctcttctggcctgcagggatatatgcagacagaacactgtatacataataaataaatctttaaaaaacaaaaaaagagtttaaacttctaaatcgtcttctcctcttcttttcccaaggaggtccacgtttttggatcccaggataaactctttagctatgaatgaacctgaacaattccatctcttcacactaccagctgtcagctgtagaatatgcaagccagcatctttattctatcttcctttttttttttaaatttttctgatgataaagcagatagtgctgttcctaacacccttctaactggagttcttcctttaggcaattttacccataacagcatatctggctaccgtggtaggggacatgtcatcactaacttcactgcagttaaacacactacattcagggactatgagttctccggtcgagtagaaattttgagtgttgtgctggctttgtcaactagaattacatgaggagaatctcagtgaggggctgtctacattgagttggactgtagacatgtcagtgggagattgcccaaattaacagacctgggaagacctaacctactgtgggtggcactattccctagggcggggctgggggtgggctccctaaactctgagtggagaaatagagctgaacaagcaagcatatctgtacgcattcactaaaacctgaaattataaactgaataaacaccaggtggtggtggtccacacctttaatcccagcactcaggaggcagggccaatggatctctctgagtttcaggccagactggtctgcagagcaagttccaagacaggctccaaaagatacacagagaaaccctgtctcaaaaaacaataacaacaacaaaaaaccaaataaacaaacaaataataaattgaatatactcctttctcccacaggccacttcctgtcagggtattttataaagaaagaaactaagctgtggcgggggtgttcttaccacacacagcttacacaccacattcatcatcagataccaaacgccatatgagtttcctggggagggggaaaagttgtctacctccaaatttggcaataacagccactggaagaatgactcagaagtccagacatgaataattgatttaactgaagattaaatcaattattggacatgacccaagccctaccatccctggttaatagttttctttcatacccacttatggaatctgaagtatctgtttatgggagcaagcagggaggggtggtggctaatgaattctaggaagatgagttttctataaagttttctccctggttccccagagaaaaatttgaacagactcggtgtcagttatcctctcaattttaagttctgccattccctagtcgcttgctggggtctctgctcagtcaaccatgcagctcctaacccaagatggtgatggtcaggctaagcttagaggaccagcttctcctaaatccacctcttaaaaacaaacaaacaaaaaaaaaaaaaaaaaaaaaaaaaaaaacttcttgccgggtgttggtggtgcacgcctttaatcccagcactcgggaggcagaggcagacggatctctgtcagttcgaggccagcctcatctccagagcaagcgccaggataggctccaaagctacacagagaaaccctgtcttgaaaaaacaaataaataaagtttatgtgtctgggtattttgtctgcatgtatgtctgtgaaccacttgcatgcctggtgccctcagagaccagaagaagtcattagatcccctggaactggagttacagatggtcgtgagccgccatgaaggtgctggaattcgaactcagatcctgtggaagagcagccagtgttctcaaccactgaatcgtctctcacacctcttaatattaccgcacggcaatcattttatttcttccatccccttctagtgtgaccagagacagccttggctttgggtactcacttgtgaaactactacgtaaaggtttgttgagtcccatgagattccccctaagcaacaccaaacggcaaggaggggagggcagtggagatttctctggaaactgagatgaattccagtcgaggaaaacaaatgtaagtctccctgtcgccttcgtcacctcaccgagtaagcattgtgccttcctcctcctccttgtccagtctccagccgacctgtgtgcaaacatgtgacaaaaacacaggtcaggccgtgcctgtcccttcctccctccaaacaccaacaccaagaacactcatgcttaacacacgtaaggcttagagggaagaagacggaaggagaaaacacttgggtttagggattcgttagtctggaaggattgaagacaaattccacaaggggaaaaaaaaaatgaaagaatgctttaccctctcaaactcacactttatatctagcagaagctgggtcatgtccccctgccctccctagagctggttcagtggagtaacatctcagccctgcctctgggaacaggcagctcagccctgtcaccacagcttgccaccctccttgcctctttagactggggaaggacagtgacaggagaaggttttcaaatagggtcctgctgtgtaagagcaggagaactgggctgttccctgggggagtatgtgcaccctgcctccagtgtctcttattttcactttcctttgctgagttaagtttctttttccccacaggctgtctggaaatgttctttcaaatcaaatctctccaggaagctctagatacacacaccagttcaagctgcttccagaaatgactcatgctggcatctggttcagtaggggacatgtcatcactaacttcactgcagttaaacacactacattcagggactatgagttctccggtcacaaagtcactaagagggtgggagaggggtaggaaaggaggaagagatggaattggggtagttgtgagctgcctagcatgggtcccctggaagagctgtgctttctctaagtttagagctatctctccagcctgccctttacccaaacccaactttcatatcataaccaaagtgaaggaaaatgtcggcttcataacaaagtagacaatacagaaatacagttgtgtgactgtccccaggcttgtccccgaacagaaatagacacatgcctaacttacattacatctgctaactttatttatgcctttgaaatttggggacatcattcatgcttgcttgttgtttgtttttttaatgggctttcctgtttttttaatgagctttcgttttgtttttgtgtttttgagacagggtttccttatagttttggctggcctctaactcctgaccctggcctccaccgccttcccagaactggttacatgctgggctttacctctgacagcagtctgccaaattcaaagacaacctgacccggcttgatttttgtactctttaagtcacctcgttatttcaaacggtgtatcacgtgattttaaacgtctgctccccacttcacttcctttatttttcttaagtttttagaattagggtacaaccatatactctcatttaaaaacataccacacgctacttccaagttcagggccgtcacccgttcttttccccctcccactcgtctccttcttttcccccaaatggtccaatttctacttcacatacaagggctttaactgttttctgacttgtttgccttgtgtatgggggtggggcggggctgggtggggcccggcaaggctgggcagggcagggcagggctggagtgcagctcctgtgggcagctgtcacaggacaacctgcaggagttgggagtcaaacgcagacagtctggcttggtggcagttgctttacccaccaagtcacctcaagggtttttccccccctccgcttgggggaaggaacatttcttttattttatttcttgagccatggtcttactatgcatatccagttggcctggaacttgctacgtagaccaggctggctttgaactcagagatccattttcctccaccagctgagttcggggattaaaggcgtgcgccaccacactcggctttttttgattttttttttttttaggctttattttgggtagatgcatgcatgacgtagaatgtgtgtggaggtcagaggacgatgtcagggagttggttctctccttcaaaatgtagctctggagatcaaactgagatcagcttggtggcaagagttctttcccaccgaaccatcacagggcccctcctgtacaagtttcagccacccaccttcacaccccacgctcagccccttaacaggactgggaaacaccaccaaccataggttcaaagggtttaatgccacaggcacccccttagttcctgttcacatcgctcaatattctgttggaataccagttagacccagcagtggccaacagcaagattccaagttccagggatgaaaaatccagatcctcggagcatgtgggctgcaggacacagtgtccagaattggtgtctacccacagcctgggagcttgtgaacgtaccagtgaaagaagcttaaaacccacccaggggcccgtgagatggttcctcgggtgaaaagtgcttgatttgaagcctgaggatgacctgagtttacctccccctgccaaactgaaggctgctgcaggccactgaatcccctgcatccaaaacagactcaaggataaaacagctcccgttctcttctctctgccaagaaaggcgggacccaaagcccaaagccctccccaaactcctctttgaggacctagaattccaccaagatggaaggagagacccaactccacaaaggtgtcccctgagcttcacacacatgcaacacaacccatcaccaacacaacagtaacaagatcaaaacaaaagaaattcaaaaatctagcctgatggcggacacccttctctatatatgtttctcttattggttggtgaataaaacactgtttggtcatagaggcaggaagacagatgggactaggagacgagaattctgggaaaggtaggcagaggtagccctccagagagacgacatgtagccaccataggagtaacaggtccagcattctccggtaagccaagaccacgtgaaaatagattagtagctatgggttaataactagaacagagctagccaataagaagccctagcagctgggtgttggagcacgcctttaatcctagcactcagaaggctcatcaattcagccacacagggtagccagtgagcgccagagagccgtgtatgtctatctgttcatctctcttgtggggctggggacctgaactcaggtctccacacttgtggagacagagccgtgtcttaggaccctctctttcctttgataaatacccacactagtggataaccgggtcatacggtagctatatttttagtttggggaatgtccatgctgcttcccataatggctatggtaatttacattctttttcccctacaccctaccagcggtttttcttccgttattgctggtgtgtcactgtggttttgggtgtatttctctgatagtaaatcttgacaattcttcacaggcttgttatgttttacagaacgtctgttcgggtccttcgaccactttttctttattgtgtaatttaattttattatggtttttaaacatgtgttggcacatgtgtctctgtgtgttatctgtgtccagatgagtgtatcagggactagagttacaggtggttataaactgctggagtgagttctggaaaccaaactccagtcctctgcaaggacagtatacactcctaacagctgcaccgtctccaaccccaccactccttttactgaaacagggtctcatctgtatactaccctgccctggaactcacgacgtagccctgacttgcctagaactcatgggaaacctcaggtctcagtgtctgggcttcggatttaacagtgccactttcatgcatattcatcatcacatttggctctgttttgtcctgttcttccacccgcaccctccctagtttgtgtgtggtacagcaagagggctctgagtgctcttgaaggccaaaggaggatactaggttcctgttctattatgtttgtcacattcctccgaaaaaaggtctctcactgaatctggagctgggctggcagctagcaagccccggtgattcacctctcttcacctcccacggcactgaagtcacaggcacgggtgcgtccagccatgaggcgcttgagatttgaactcagagcctcatgtttgcacagggcacacattggaccagagctcactctctctctctctctctctctctctctctctctctcacacacacacacacacacacacacacacacaaacagacacacaaataaaaaataaaataaatcttttttctaaaagaaaaataaaatctttttaaaacaaaataacaatgagcgtaatggtgcatgcctttaaccccagcacttgggaggcagatcactgtgagtttgaggccagcctggtctacaaagtgagttctaggaaagctggggctacaaagagaaatcctgtctcagaaacaaacaaaacaaaaaacggggaaacacctggtgagaaggaggaagaaagcaactgttagttaggatggtgggtgcctacggcacctgggccttgcagctgatgaggccaccatcctaacaccaagaaagaagtgagaggtcctcactagggccatgcacccccaggtgaagcaggctctgttccctctgttgtgcaatgtcagaaacaacaggcacagcctcctcatttgctgacattaaatttaaaaatccacaaaaatttagtttcttagccactttcatttgacactgtgagtttcactcttagccctggagaccaggaagtcctcaaatgacttgctttacataaccatcttgcacaaggtttcatgtctttgccttcctcttgccttacatgctggtttcctctctaatagtgttctgacttagttcatgggtcctgtgtgtgtggtctgtgtggtgtgtgtgtgtgtgtgtgtgtgtgtgtgtgtgtgtgttgtggtgtgtgtgtgtgatttgtgtgtggtgtgtgtgtctgtgtgtgtggtgtgtgtgtctgtgtgtctctctgtgtatgatgtgtgtctgtgtgtgtgtgtctgtgtgtgtgtgtctgtgtgtggtgtgtgtgtgatgaggtcctgaaaaactgcctttgcctcccacaccagctcacccactttattctagaagctcagttatatggaggcccccatggtccaatcatccttaaacttccccccactgctctgaaaacccagggctaggttgagtaacagcaatgaaactgagctgtcttcttccgtattcagtaaggtgtggaccacgagtatttcatatatggtcccaactgtgttatacacatttcctctataggaaaaaaaaaaaattgagccagggtctcactgtgtagccccagctgaattctgccttcaaagtactggaattaaaggcgcatgccaccatgtcgagtttcatatgtaatggtcttaaagatttgtttttgttttttttaatgtttaattatttatgtgttatgtatacgtgtggtttttgtttttgtttttcgagacaggatttctctgtgtagctttggagcctatcctggcactcgctctggagaccaggtggccctcgaactcacagagatctgcctgcctctgccaccctagtgctgggattaaaggtgtgtgccaccaatgcctggcttgtttttgtttttttaatgtttatttatgtatatgtgtgtgtctatgtgtgtatgtaaccctcagaggtggggatcagatgtccccagaatggagttccgagagtcgcctgccatgggtgtcaggaaccaaattcagtcaggtcttgccaagaacagttaagtgctcttaaccactgagccgcctctccaggcccagacttacctttttattttatgtgtatgtttgactatacatgtactccatgtgtgtgcagtaaccatggaggccagaagggggcgtcagatcccctggagttacaaagggttgtgagccatcactcagatgccaggacttgaacctgggtcctctataagaaccggaagtgagccaggagatgcacttgggaggcagaaacaggtgtctctctctctctctaagtcgaggccagcctggtcaatatagagtgagttccgggacacccagggctacatagagaaaccctatcttggaaagaaaaaaaaaaaggaagagaggaagaaagggagagagagacagagagatgtcagagcctgctcctgggtaggggcatgaggattgagaaagggcagataaagaaaagagacagaaacccaggacagattcgggaggactgcccggcccatgcctttcagctcaccggacagcccgagtctaatttagaccctgcttatacgcagactggaggcaaaagcagaaccaagaacagagaagggccgcgggctccctgtccctgagacccgctgggaggaaggagctccctgtgtccctgtctctgggtgactttctgctggcctcctccccagacaatgtgtccctcccctggggccaacacaacttccctggctctcagggaggcagaaacaggcaagctggagctctaataactcagaatagactccagatggaaactgagtcacctgtggacccacgaagacatcaacagttaagcatccaagaaatggaatgaagtggtctggcctgtcaggtctggggagagggaggggtgcaggaccccagggaagggaggggaacagggctctggggctgtggctgcaggaggcgggaccacagagttcaaggaaacaagctggagctgcagggtcagggacacaacactgacgcagagaagagcccagagcctgagagcccagggacacggacagcggactggacaggacagcaccgacatcaccgcagcagaggcttcagtgcgttgttagttcctgcccatacgcagctgtaaatctctaggtctactttctcgggggagcagacttgacagagcgcctgacaccatgtgggctctcatcttctggctcctgagtcgcccccgggacatcggagcccgtgagtgcggtgtggagggggttttgtgtcaactcgctgggcaagttcagggtggatctctgtgaattcgaggccaggctgattgacagagtcccaggacagccaaggctactgggtcgaaaaaccagagagagacagacagagggatggagggacggagagggagggagcgagggagggagagagggagggaagactaggggacagggagagacagaaaaacagggaaaggaaggagaggggaggggagaggagaggggagggaagggaagagaagggagggaaggggagggagtgaataaaaggaaacacagctagctaatgacacaagctgaccataaccatgtgaccctgctcccagaacaatattaaaaaaaaaaaaaaaaagacaaagacatggactcatagctctggctgtcttgaactcaacctgtacaccaagctgaccttgaagacataggatttgggcttaaaggcacccaccaccaagccataccaggcctttcctacacattctaatgtgtttgagtatgtgcttgcatataagtatgtatgctgtacccagaggggggctcagagccaacctcagccctctcggggagcagtaagtggtctcaactgctgacctgtggtgtggtttttgaactgcatgttgacctataaagtatacactgtccacattagagttcacatttattcatgtgcgtgtgcgtgtgcgtgtgcgtgtgcgtgtgcgtgtgcgtgtgcgtgtgcgtgtgcgtgtgcgtgtgcgtgtgcgtgtgcgtgtgcgtgtgcgtgtgcgtgtgcgtgtgcgtgtgcgtgtgcgtgtgcgtgtgcgtgtgcgtgtgcgtgtgcgtgtgcgtgtgcgtgtgcgtgtgcgtgtgcgtgtgcgtgtgcgtgtgcgtgtgcgtgtgcgtgtgcgtgtgcgtgtgcgtgtgcgtgtgctcagacagacagacagacagacagaaagaaaacaggcaagagagcaggagaagattgacagagaggactgtaacaacagataagcatctattttggggggagggagtttgaggcagggtttctctgtggctatagaagttgtcctggaactggctctgtagaccagaatggtctggaactcacagagatactccttctgatgggctgggactaaaggcctgtgccaccaccgatcttctggccagataagcccttttaaggactgcaagtgtcagacagggaagtatatagtggctgactgtagtgtcctgcctcaacttggtatgccagattttgttgactccccaaagaaagcattacccccactgagtacaagggagggcaggagaaggggagagaggagaaactaggattagtatgtaaaaattaaaattgaaagaaagaaagggaggctgaaaggtgggttgtaaagatcacaagaaagggtgcctttcagaaacaaggagaggaggggagagagatcaaagagctatcttaatagagggagccattgtggggttagagagaaacctggtgctagagaaattctcaggaatccacaaggatgaccccagctaagactgctagcaagagtggacagggtgtctgaatgggcctgccctttaaagattgctggtgactatctttgtcaccgagaacctacatccagtgcctgatggaaacagatgcagtgacccagagccaagcctgggctgagctccaggagttcagttgaagagagtgaggatcaagggggaggagtcaagatcatgatgggaaatagacagggctcacgtgagctactgggagtccatggactctggactgacagctggggagcctgcatgggacccaactagtcactctgaatgtgggtgacagtcatgtgacttgatctcttgtggtgggaggtcctggctgtggcaccagaacctttcccaggggcatgaaccggcttttgggagcccattcccaactgtgggatgccttacacagccttgatacagggggtgggtcttggtcctgcctcaacttggtatgccagactttgttgactccccaaagaaagcattaccccatctgagtacaagggagggcaggagaaggggagagaggagaaactagggttagtatgtaaaaattaaaattgaaagaaagaaagggaggctgaaaatgtagctcagttgaggggtgcctgtccagttcctgggtccatccttcccacaacaagaaacagaaacttaggctgggcattggtggcactcacctttaatcacagcactcaggaggcggagacaagctccaaaccctgtcttgaaaaaacaaaaaaaaaaaaaaaagaaaaagaaaagaaacagaaactttataaagaggaaaaagggcttctggctgtggctcccagggacagcctttctctccaggtgtagcacccctgcctgctcatctgggagtctccaggaggcttcagaggcttgggttgtagaaggttagagctgggaaccctggcttcctattatttttcttctatactgaaatgagctgaacccagagaggagtgtcgtagtgtctgtctcacagctgtgacttctaaggtcactgaggagagactgctttgagctctaggctactcagggccagaaaaacaggatatgggtggcctactctccacccttccaaagaaggagcaaacacagtgttccggaaagcctgccttgatacatcgcatcaacagatgactggataaagaaagcacagttcaaatacacagaattggattcactcagccatgcaatggaattgcatgccatcttcacgaaaaattaaatcatggcattgtgaggaaatggatgcagctgaaatcaatacactaagaagcaagcctcagaaagacaaataccatatatcttcttgtgtctggaactccagtttaaaaaaaaatgtgtgtgtgtgtgtgtgtgtgtgtgtgtgtgtgtgtgtgtgtgtgtgctggccatgatagtggacacccatctctgtgagttcaagaccagcctggtctacaagagctagttccaggacagcctccaaagccacagagaaaccctgtcttgaaaaacaaacaaacaaacaaacaaacaaaaaaagtaaaaccaaaaatctcctcacatcacacttttggatgctcatcccttttctttcacccccccaccgcccatcctgctggccacctttctcttctcaaatatacctttttaaatactattatgtgtttttttccatttgtttggaactggggtagccctggctggccgggaactggatctgcagggcaggatgacgtcacactcactcctctccaacagtgttctgacttagttcatggctggtgactttgtgtgtgtgtgtgtgtgtgtgtgtgtgtgtggtgtgtgtgtatgtgtgtctctaggaggggaggtcctgaggtactgcctttgcctcccacaccagctcacccactttattctagaagctcagttatatggaggcctccatggtccaatcacccttaaacttccccactgctctgaaaacccatggctaggttgagtaacagcaatgaaactgagatgtcttcttccctattcagtaaggtgtggaccacaagtatttcatatatggtcctaactgtgttatacacatttcctctataggtaattttttttttttgagccagggtctcaccttgtaggcccagctggcctggaactcagacacccacttctgccttcaaagtactggaattaaaggcacatgccaccatgcctttttttttttaaagatttatttatttatttattcattcattcatttattatacatgcagtattgtgcctgcatgtatgtctgcaggccaaaagagggcagcagatctcattatagatggttgtgagccattatgtgtttgctgggaattgaactcacaaagtttgaaatagaagtcagtgctcttaagctttgagccatgtctccagccccaggccaattttatatgtaatggttttaaagatttgtttttgttttttaatgtctaattatttatgtatacttgtgtgtctatgtgtgtaaccctcagaggtggggatcagatgtccccagaatggagttccgagagtcgcctgccatgggtgtcaggaaccaaattcagtcaggttttgccaagaacagttaagtgctcttaaccactgagccgcctctccaggcccagacttacctttttattttatgtgtatgtttgactatacatgtactccatgtgtgtgcagtaaccatggaggccagaagggggcgtcagaccccctggagttacaaagggttgtgagccatcatcactcagatgccaggacttgaacctgggtcctctataagaaccggaagtgagccaggagatgcacttgggaggcagaaacaggtgtctctctctctaagtcgaggccagcctggtctatatagagtgagttccgggacacccagggctacatagagaaaccctatgttggaaaaaaaaaaaaaaaggacgagaggaagaaagggagagagagacagagagatgtcagagcctgctcctgggtaggggcatgaggattgagaaagggcagataaagaaaagagacagaaacccaggacagattcgggaggactgcccggcccatgcctttcagctcaccggacagcccgagtctaatttagaccctgcttatacgcagactggaggcaaaagcagaaccaagaacagagaagtcggtaaagccgctcctgctctgtcctgcagggccgcgggctccctgtccctgagacccgctgggaggaaggagctccctgtgtccctgtctctgagtgactttctgctggcctcctccccagacaatgtgtccctcccctggggccaacacaactttccctggctctcagggaggcagaaacaggcaagctggagctccaataactcagaatagactccagatggaaactgagtcacctgtggcccccacgaagacatcacagttaagcatccaagaaatggaatgaagtggtctggcctgtcaggtctggggagagggaggggtgcaggaccccagggaagggaggggaacagggctctggggctgtggctgcaggaggcgggaccacggagttcaaggaaacaagctggagctgcagggtcagggacaacacagaggcagagaagagcccagagcctgagagcccagggacacggacagcggacagcacacaccgacaccgacacccacgacaccgacacccacaccaccaggaataggacgggacggggcgggggcggggctgacccacacctctccagggaagaaagccctcagcgccagccccaaaccccacccctgcagctgcttcatgttgttacttcccgcccatactaggtctactttctcgggggagcagacttgacagagcgcctgacaccatgtgggctctcatcttctggctcctgagtcgcccccgggacatcggagcccgtgagtgcggtgtggagggggctttgtgtcaactcgctgggcaagttcagggtggatctctgtgaattcaggccaggctgattgacagagtcccaggacagccaaggctactgggtcgaaaaaccagagagagacagacaaagcgaaggagggacagacagagggagggagcaagggagggagagagggagggaactaggagacagggagagacagaaaaacagggaagggaaggagagcggaggggagaggaggggggaggggagggagtgaataaaaggaaacacagctagctaatgacacaagctgaccataaccatgtgaccctgctcccagaacaatattaaaaaaaaaaaaaaaacaaaataaaaagacaaaggcatggactcagctctggctgtcttgaactcaccctgtagaccaagctgaccttgaagacataggatttgggcttaaagcacccaccaccaagccataccaggcctttcctacacattctaatgtgtttgagtatttgcttgcatataagtatgtaagctgtacccagaggggggctcagagccaacctcagccctctgggggaagcagtaagtggtctcaactgctgacctatcgtgtggtttttgaactgcatgttgacctataaagtatacattgtccacattagagttcacattcatgcgtgcgtgtgtgtgtgtgtgtgtgtgtgtgtgtgtgtgtgtgnnnnnnnnnnnnnnnnnnnnnnnnnnnnnnnnnnnnnnnnnnnnnnnnnnnnnnnnnnnnnnnnnnnnnnnnnnnnnnnnntgtcgggaggaggtggatccctgtggcgggccctgccagccacacacaacagatctagtgtaacaggtttagcataaggccatctggaaatgggaacatgagagaggcaggaaggcaggcaggcaggcaggcaggcagagagacagacagacagacagacagacagacagacagacagacagactgaaaacaggcaagattgagatagggtttctctgtggctttggaggctgtcctggaactcgctcttgtagacctggatggtctggaactcacagagatctgccttctgatgggctgggactaaaggcctgtgccaccaccgatcttctggctagaaaagcccttttaagggctgcaagtgtcagacagggaagtatgtagtggctgactgtaggtgggttgtaaagatcacaagaaagggtgcctttcagaaacaaggagaggaggggagagagatcaaagagctatcttaatagagggagccattgtggggttagagagaaacctggtgctagagaaattctcaggaatccacaaggatgaccccagctaagattcctagcaagagtggacagggtgtctgaatgggcctgccctttaaagattgctggtgagcctatttgtcaccaagaacctacatccagtgcttgatgcagtgaccaagtggccaagcctgggctgagctccaggagttcagttgaagagagccaggagcaattatattagcaagggggaggagtcaagatcatgatggggaaacagacaaggctgaggtgagctactggaagtccatggacactggacagacagctggggagcctgcatgggacccaactagacactctgaatgtgggtgacagtcatgtgacttgatctcttgtggtggggggtcctggctgtggcaccagaactttcccaggggcatgaactggcttattggagcccattcccaactgtaggatgccttacacagccttgatacagggggtgggtcttgttcctgcctcaacttggtatgccagactttgttgactccccaaataaagccttaccccctctgagtacaagggcgggggaggagaaggggagagaggagaaactagggttagtatgtaaaattttaaaaattgaaagaaagaaaaaaagaaagagaaatggaggctgaaactttagctcagttgaggtgtgcctgtccaggtcctgggtccatccctcctaccacaagaaacagaaactttataaagaggaaaaagggctctggctgtggctcccagggacagcctttctctccaggtgtagcacccctgcctgctcatctgggagtctccaggaggcttcagaggcttgggttgtagaaggttagagctgggaaccctggcttcctattatttttcttctatactgaaatgagctgaacccagagaggagtgtcgtagtgtctgtctcacagctgtgacttctaaggtcactgaggagagactgctttgagctctaggctactcagggccagaaaaacaggatatgggtggcctactctccacccttccaaagaaggagcaaacacagtgttccggaaagcctgccttgatacatcgcatcaacagatgactggataaagaaagcacagttcaaatacacagaattggattcactcagccatgcaatggaattgcatgccatcttcacgaaaaattaaatcatggcattgtgaggaaatggatgcagctgaaatcaatacactaagaagcaagcctcagaaagacaaataccatatatcttcttgtgtctggaactccagtttaaaaaaaaagtgtgtgtgtgtgtgtgtgtgtgtgtgtgtgtgtgtgtgtgtgtgtgtgtgtgctggccatgatagtggacacccataatccagccttcatatagatgaggggatggccaagtagggaccctgagagggaaggaagagatggccaaggaggcaggtgacacagagcacaaggatgaagcagcagaaactggcttgaccaggaaagacagccaggcagctggaagaggagcagtgagggagaagactgaatgatgacaaaacctaatggctcaggctgcagagagggctcactggtgaggagaacaccctacactgctcttgcagagggcgggggttttgtccccagcacccacgttgggcacctcacaaccactgtaactccacttccagggaacctaacacctgatttggcctccgtgtgtgtatcacgtatgtgatgtgcccacacaagccaaaagacatcggatccccaggaactatagttacaggtgcttgtgagcagccatgtgggtgctctgcaaaagccaacagatgccatctcttcagtccctaaaatgatcttcacaaaaagaaagtgcttgggatgaggtcagcagagagagcagctcctctcaggcagcagtcctgagttcagtccccagcagtcagaaagcaaagcagcctgcaccccagcatatggacacatatacacaaagacactagacacaagccatcactccatgctctaactcatttatctatctatctatctatctatctatctatctatctatctatctattggttttttaggacagggtttctctgtgtagctttgtagaccaggcttgcctcaaactcacaagagatcttcctgagactaaaggcatgcaccaccaacgcccagcaagttatttcttttttttgcggggggtggggggcgttcgagacagggtttctctgtggcttttgaggctgtcctggaactccctctatagaccaggctggttgaactcacaaagatccacctgcctctgcctcccgagtgctgggattaaaggtgtttgccaccaacgaccggctcccaagttatttcttattcatctaaaaccagtgtttcccatatgcctatcattttgtttcataagacagtcttactatataaccctggctggccttgaactcacagagctacaactgcctctgccttcttcagagtgctagaatcaaaggcctgtgccaccaataccctaccctaacttatttaaaacaaacaaaaattcgggagtgggggtgagatgctgcatctctgaatatgcacctcatgcagacagagcccttggaggccagaaggggtcaggagctggaggtagagatgaatgtcaggggccatgagcatgctgggaattgaactggggtgtctgtaacagtgaccatgctctcatccactgagccgtctctctggcctctcacacttacatttcattgtcagtccctgacttatcctagtgcagtgtgggatttgattggtttggctgctgggttgctgtgaagttgttcttatgctgagcaccctgtctcctccacagttcacctgcacaggcaggcacaggcaggcacactcactcccccgcccaggagctgggtcctcagtcagtaccttacactaaatcctcattcccacctcagggtcacattctctgctgtattcctactcggctgtgactaagccgggtccacaagtccctgcattttccgccactggcttcatagacgaccagcctttcattcgctataacagcgacagcatggaggcagagcctgctgttgactggctgagggaagacccagggtaccttgctgacgagacccagatcttcaccaataagatgaagattttccagttgagcctgagaaacatacagaagtactacaacagctccggggcccggagtcagagagtagcagatggcgtccaccagcaagcaggtatgtgcctggagaaggtggtaggacacagctgacctacctcactcatccccagaggcgggaggccctcagtgcccagacagactgaccgaccctggagaacaggctggcttaatctgctcccagagtcagggtctgcgagacagacatcagtcagtcagagtcccagatgtaaaacctcacaaacagctcacagtgtttgccttctgtgggtaagcagtcatgctgggaaccctgtgactccaagccagggggcctgggttgcagttgactttggaattcactagagaattcttcagcataaaagcttgttgttttcttgctggacagtggttattttggttcagtttgggttttttgtttctttgtttttcttttttttcttttttttttcttttttgagacagggactcccagtgcccagggtggcctctaatccactatgtagctgaggatggcctgcctgcacctacctgcttgcaggattgcaagtgtccacccccaccagtcacatagttcctcctttaccatcacccttaggtgccttgcaagctccgggtgttagctcaggagccctgtgggcttaagccctacatttccatgagcacaaggcaaagagagtcacagagaatgaatgaccagcatgaggacacagcagacctaagtcctacctgcctggccagtggttcatttactaaacctcaagcagcttgggcctggcccgacagagctgacagcacttaaagggtatcagtgctcagactacatgatgtataaggagaacaccctctaaggagagcacatggaatccgatgggcagtgcaagggcgccaggaatcccatgggcagtgcaagggcgccaggaactgttgtggaggtttttcttgtcctgccaagtccagctgccactcccagccccaaatgaacacacaaagacttaaactgttggccgatgcctagggcttcttattggctagctctgtcttaatcattagcccattgttataaacctacatattttcacatggtcttggcttaccggacaatgccaggacctgttacttctttggtggctacaagtcgtctccttgccacatctccccaccttccattcccagagttctcctggtctcctagctccacctagcatcctgcctctgctggccaaacagtgtttctttcatcaaccgatgagagaaacatgtatacagaaggacgtcccccatcaagggaccataatggagaggcctgggagatacatctggcggccctgacatgcttgtcctgggggcggttctaggccctcacaccctccagttcacatatggctgccagattcgagatgacagaagtaccacgggacactggcagtatggctatgacggcagtgactacctggccttggatttggactctatgcaatatgtagcagccacgttcattgctggctacaccaagcggaaatgggagcacagcgagtactggctggagagagacagcagctacctgaagacggaatgcatactgtggctccacagatacttggccctgggaggagagaacttcaatcgaactggtaaacacccctcctggcccagccctgctccctgtggccagcagggtgagagctcccatggccactccagcacagggatggatggaggtagtctctctgggcggggccactgtgccatgggtagcttcccacaagcagacgtgcacatttttgagtctcctggactgtggtcaccttccacccacctctctggggtctctactcgctaaatgtgtcccaaaggtccttgggactgtctcccacttctgccatttccactggagacatgaagctgtgcctaccagcagctatctatctgtttactgcagaccctccccagacgagagtaacccaccatcccagacctgaaggagacgccaccctgaggtgctgggccctgggattctaccctgctgagatctcactgacctggcagttagatacagaggaactgacccaggacatggagctggtggagacccggccttctggggacggaaccttccagaagtgggcagctgtggtggtgccttctggggaggaacagaaatacacatgccatgtgcaccatgaggggctgcctgagcccctcaccctgagatggggtaaggagagagtgggggcacagagctgggctcagggaaagcagaagcccttctggagaccctgagcagggccagggtccttcagggtccctcttctttcttttcctttcagagcctcttcagcacagtaccccaatcatagaggagtgtactaggagcagtggatgtggacatacagtatccaggaatggcctcgtgcttattgtcgttttcatagtagttgtgtttattattgttggagttgcctgctaccgtttgaaggtaggaaaaggaggtctgagcgccctatgttggaaggagggtcaagagttaagttgtgctgggcagcagcagctgtagtggccgtggcccacgcatgcctttaatcccagtactagggaggtagaggcaggcagatctctgtggccagcctggtctatcaagggagttccaggacaggctccaaaacaatacagagaaaccctgtctggaagaccccccccaaaaaaaaaaagttttggctaatctcatgctattttgacttcatgtcatttctgtaatatatttttaagattttatttatttattatgtatacagttatctgcatgcatgcttgcacccagaagagggcaccagatctcattacagatggttgtgagcctccatgtggttgctgggaattgaactaaggtccttggaagagcagtccatgctcttaacttctgagccctctcccagtccccatttctgtaatgtctttaaaaaaaaaaaaaagaaagaaaatgtaatgaaactctaaaacaactacatattagccccaattaaatgttttcctttataaaagttgttatgatcatggtgtctcctcacagcaataaaaccctaactgagacagacagcttcttttctaggagttgtgttcctgcagcatgccagcagactataggcataagaaagggtctcactatgtagctctagctgtcctggaacctcactaatattccaggctggcctccaactcatagagatctgcttgtctctgtctctgtgagttcaaagccagcctggtctatagagagagttccaggacagccagagctacagacagaaaaaccctgtctcgaaaaactaaagcaagcaagcacacacacacacacacacacacacacacacacacacacacagcaccctagggcaattttacacactagcaaggtagaaaatgtacaggttttaactactgagccaccttttcagtccctaaaattgaaattgctttaaagggcccgagtatcatggagtacgaaagtgactctaaccatatctcctgtccctcatcagtctgttctggagctctgaagtttaaattggcttgtctgcttcatcttaggtccttcgctagggcaagtgcaccctcttaactgcagagccatctccccgaccctgaaacttctattctctgctcattggcttttgtgttgacaggcatcaagaactctggcacctcgtcacatgtcccggcagctgtaaggaacaacctggctctcctctcttttctgctgagatgctgagccagcggccatcgtctagcaggcacaggggttgcagacctgagctccctctccagagggactgaaatgagatgatgaaatgagcgggctcccccctggcccagcacataattcctggtgttccctggacttcttgaccttgccatttcatccaattcaaaggagtccagccctgcagctccaggagaggcactggggtgtctgacctgagattatttgcatgattactctgaaagagtaatcatggcttgagagccttcacccagtagctgatggcagcagaagcagacacccacagctaaacactgagggaactcctgcaatccagttgtagagcaggaggagggatgagcaaaggaggcaagaccatgctggagagacctacagaaactgctgacctgacctagtgagagcacagggaccccagctgtaaagctggggaaccagcattggactgaactaagccctctgaatgtgggtgacagttaggaggcctgggcagtctatggggcctctaacagagccagtgtttatccctagggcacaaatggactttcccattccctatggagggatgctattgcagcccaatacacgaaagagtggtgggagagttgttaggccagatgttgggccccagccccgacggcgtctctgtgagttgatgcaaccacagcccagccatgccccactggctcttacaccttgggttttttcactgtgccataagtctgtacataaggctgctttctccctgccaaaaagatagggacacacatagcacaagcagcaggctctgcttataactaaatctctaggcttctgccagtaagcagcacctccttcggggcctctgcctctgctcctgcctccaggctcctgccctgtgtgagtgcctgccctcactacctttgaagacgaacagttatttgtaactatgggtgaaatatgttgtttcatcacagccatagtgcgatgggggacgtccttctgtatatatgtttctcttattggttggtgaacaaacactggttggccaatagccatgcaagaagtataggtggggctaccagatgaggagaattctggggagaggatgcagagaggggtcaagagacactgtagttaccaggaagattggatgcaccaggtgttcttcggtaagataaggccatgtagaaatacataaatagtaatgggttaataacagaaagcctgtaaggaaactgagtcattggccaaactatagttactgtgagtttctgtgtgtttatttgagtctatttggctcaggaccaggtggaaaaggaactcagtctgcaacagtgatcctacctaagacaaacatgctcagcctgcagagatatggggacatcttctgcctatcacacagcatcgggggactctgtggctatctttaactctcttcatcacagatgaggaatgactaacacgactaacgggccctttgtggtgagggcgtgcttatcacactggtgcacacggcgctgaaaagagctcacttgtcaggaaactatgctgagacctgtgaccctgagcaaagccgagcagtgtggaattccccatgctttcagtcacagagggcataggaaggactgacgtatggaccttgacagtgaggatgtaaggcaccctctttatgtggtatacggtaagcacacagggcaatcttttaattgtatttgcatttatttattgtgtctgtatacattagcagccagaggacaacttgtgggagttggttctctccttccaccgtgtggagactggggatcaaactccagtcatcagagttgacagcacgccctttacccactgagccatctctcaggccccgccctcttctgaccttggcaagcatcccttgaacacatatttacatacatacatgcatacacataaataaaaataagatcttaatcccagcactcaggagtcagaggcaagtggatctcagtgagttccaggccagcctggtctacagagtgagttccgggacagccagggctgtaacacagagaaaccctgtcttcaatccccacccccccccaaaaataataataatactttaaaatactgcaaatctatgtgctgtatgagcattaaaacccataacaaaataccagctaacataagctctttaaacaaaaggccagcacagtgaactgattctatgaaggtcatgctttgaatttaaagtgtccctcatgtttttagcttgctttcagcagagtctcacacagaccagctggcctcaagctcaccatgcagttgaaggtgactctaaactcttgaccctcctgtattcaacacccacgtgaggaggtgacatctccatatcgggctttccccatgccttaaaacattttccccagctgccttgctttggtccctagggaccttttaatttaatgttttaaaactccttgttctcatacaacaaggacatctgttcaactatgttcatagcagcactacttgtaatagccagaaactggaagcagcctagatgcccctcaaccaacgaatggatagagaaaatgtggtacgtttacacaatggagtactactcagcagaaaaaaacaatggaatcttgaaatttgcaggaaaatgcatggaactcgaaggaaccattctgagcgacgtaacccaatcacaaaaagacaaacatgatatgtactcactcatatgtggattttagacatacagtaagagactaccagcctacaatccacactgccagagaaactagtaaacaaggaagacnnnnnnnnnnnnnnnnnnnnnnnnnnnnnnnnnnnnnnnnnnnnnnnnnnnnnnnnnnnnnnnnnnnnnnnnnnnnnnnnnnnnnnnnnnnnnnnnnnnnnnnnnnnnnnnnnnnnnnnnnnnnnnnnnnnnnnnnnnnnnnnnnnnnnnnnnnnnnnnnnnnnnnnnnnnnnnnnnnnnnnnnnnnnnnnnnnnnnnnnnnnnnnnnnnnnnnnnnnnnnnnnnnnnnnnnnnnnnnnnnnnnnnnnnnnnnnnnnnnnnnnnnnnnnnnnnnnnnnnnnnnnnnnnnnnnnnnnnnnnngtagattagaagaaaggatatgccataggtagggctttagttgggttggtggtgggaggggaggaggggagggagaagggaactgggattgtcatgtaattcaatcttgtttgtaactcaaataaaataatataaaaaaataaccatcaaggcagtggtggggcacacttctaatcccagtacttggcaggcagatctctgtgaattgaaggccagcctggtttacagagtgagctccaggacagcaaggatacacagagaaaccctgtctcgaataaagcgaaacaaaaacaacaaaaaccacaaagtgacgtcactgaacatgacctgcaaagaggtaatacagacaaagaatcccagcagcacagagagcagctaagtgggtgaggtaactgagcaacaggttttgagtatttactgttgggtcattcttgatctagtaagctgagagtggggggggatgcagtcctaaaacagagctcccaggaggctgacgaagaaagaggatgtctccttggccaccctgggctacatgatgaatgagtgatatttctggcagaaatatccatttaaggcgggaagtgagacagaatgtgtgttaatgctgtgaagacaaatccaaagaaagaaccaaaagcaatcaagctaccagctgtaaaagactggctggttgctcctcgccagaattctggccgattcgtccttctctcttggcgggctcgactgaagagtgacagagcctgtcctgccttcctgaggagagggctggactctgaaggtcctgagcgtcctgctggttgaacctgatacctgaccctgcccacagatactcaacctcctgtcagaggctgccctcaagtggacactttggcaaattaaaattgtgtgaggtggggtgtgtgtgtgtgtgtgtgtgtgtgtgtgtgtgtgtgagagagagagagacctgtgtgtgtgtgtgtgtgtgagagagagacctgtgtgtgtgtgtgtgtgtgtgtgtgagagagagagatgtgtgtgtgnnnnnnnnnnnnnnnnnnnnnnnnnnnnnnnnnnnnnnnnnnnnnnnnnnnnnnnnnnnnnnnnnnnnnnnnnnnnnnnnnnnnnnnnnnnnnnnnnnnnnnnnnnnnnnnnnnnnnnnnnnnnnnnnnnnnnnnnnnnnnnnnnnnnnnnnnnnnnnnnnnnnnnnnnnnnnnnnnnnnnnnnnnnnnnnnnnnnnnnnnnnnnnnnnnnnnnnnnnnnnnnnnnnnnnnnnnnnnnnnnnnnnnnnnnnnnnnnnnnnnnnnnnnnnnnnnnnnnnnnnnnnnnnnnnnnnnnnnnnnnnnnnnnnnnnnnnnnnnnnnnnnnnnnnnnnnnnnnnnnnnnnnnnnnnnnnnnnnnnnnnnnnnnnnnnnnnnnnngtgtgtgtgtgtgtgagacctgtgtgtgtgtgtgtgtgtgtgtgtgtgtgtgtggtgtgtgtgtggtgtgtgtgtggtgtgtggtgtgtgtgtgtgtgagacctgtgtgtgtgatgtgtgtgtgtgtgtgtgtgtcagacagggtttctctgtgtagctttggagcctgtcctggatatgtgtgtgtgtgtgtgtgtgtgtgtgtgtctgtctgtctgtctgtctgtctgtctgtctgtctgtctgtctgtctgtctgtctgtctgtctgtctgtctgtctgtttgtcctggaactggctctgcagaccaggctggcctccaactcaaagctccgcccgcctccgagtgctgggatcaaaggcgcgcgccaccacccccagcttgcacttgtcactgacctctcgatctgatctttacaagccccctgaccaccctgaccacacggtagctgtgggtgaaggagtgcgtctcttcttccgtttgagggggacggatagatagttctgtcccgtcgggcaggtttcccttcagcagcctcagagtctgtctgtgtgtcacagccaaacagccaaatacccagtcaagcggcccagccagcgggtgtgcagggtgacatcacagccgacatctcagaggggcacagcactgacaaactcacggtgtcctcagtaccctcagttcccgtgcacgctccggactccagttactcaaactccagatgactcggtcaccctggcaccgcggcagactcgcagcaccggggactcactgtgactccacctccgggtgtcccaaagtcaaggacagcgtacagcggcgacagcgccggacaactgctcagaatgtcagccttcgccccaggcaggaccccggcgccccctagtggcgcaaagttagagcggctgcaaccctggaaccccggccaggctcagcgcgcagcagcttcggctgcaaagccaacaccctaagatcccaggccgcccagcgctctgagaacccggcggagggaaagtgtcacggggtggggggggaaccgggtttatcagctgccccacctgtccgggcatccaaccagaaaccactgcaggctgctgcaaccacaccccgcgcacgccagggcctgggttccatcaacacatgggagagggacaaaaataaaataaaataaaatgcatgtcatcccccggaggtgacagacgcggtgggagggggactggtccctctccaccagagaacaggaggtggggtgcggattgtgagcaaaccctgcctctctggtgcgctgtctcctccccgagctccgtcccgctctctgcaaaacctttccatccactttcagtgtcagcctagcagggtgttataaaccgttaccgggcccagggcggtgagattccggaacagagacggagggagcagccagcccaggctctcctcagcatccctagtgcgtccgcgcggccaccccgccccggctgccaggagaacccaggcctggctcttggctgcctctgtcttgagccataaagggcgagggaggggctccgtggttaggagcaccgactcctcttcaagaggacccggcttcaatccaggaccctacacggtggctcacacagccgtctataactccagctccaggagagccaacacccacggcaaaacaccaatgcgcatatttttaattaaataataattttaaaaaaccgtcaagggaggcgggtggcggcgggggcgcacgcctttaatcccagcactcgggaggcagaggcaggtggatctctgtgagttcgaggccagcctggttttgcagagcgagtgccaggacagactccaaagccacagagagaaacaaaaaacaacaacagcaacaaaagcaaaaccaaaaatctcctcacatcacactttgggatgccgatccctttccttccgccctcccgctcctgccggccacctttctcttctcaaattctttttaaaatactatggtttttttttttcccccgtttgtttgaaacggggtagccctgtggcccggaactggatctgcagggcaggatgacgtcacactcgggagatcggaagcccctggctcccacctcccagccccgggccccgacctcccaggccccgggctgccccgggcaccgcgttctgaaccccgggtcacgtgcttcagaccggcgcagtcctgacaatttggggataaatcagtaaagcggggtggggtgggggttaagatccaggccgggaaaagaaatcaaagtaagcactagagaaagagctccaagttggggaactttgaggattgcaatctctcctttccctttccctttccctttccctttcccttttctttctttttttttcttttcttttcttttttttttctttttttttttggtaaccgcgatttctatccagaagcccctttcccaggtttaggcgacagagcgagcccaggacggccaaggccacacgcgcacacacagaggagaaacaagcacaaaaataacaatcatgaaagtaaagggtttatcccggcttaccgtttaagaggaaacccgcggagctggcgaaggcgaaccggctttgcacagagggaagaagatatgaagcttaaaaaccctgacttcccagaccccgtgacctacttccgtcagcagacgccccctactgggggttccgggaaacggctgcgatgggctccactcgcaaaagaagctaactctttttaatcccagcactctctccggaggcagaggcaggaggatctctgtgagttcgagaccagcctgaactacagagcgggttccaggacagactccaaagccacagaggaaccctgtctgaaaaaccaaaaaaaagaggaggggaggggaggagaaaggaaaggaaagaatacacacgttttaatgatttctctttatagccctacaggggtagtgcactcctttaatcccagcacttgggaggcagagcctggcacatctctgagtcccaggccagcctggtctaagtgtatgtatgtaggcctgtctggggtgtgtacgtgtgaatgcgattgccagcagaggccataggtgtccaaacccctggagatgcatttaccaacatgggtgctaggaaccaaactccagttccctggaagaccaccacaaattcttaactgccgagccatccctccagcctccaatttttattttttgagacagggtctcactatatagccttggctgagcagaaactcgctctgtacaccaggctgtcctcgaactcacagagatcctcctgcctctgcctcccgagtgctaggattaaaggtgtgcaccaccaccgccggacaaacaagcaagcacactcttaactgctgagccatctctccagtcctattcttcaaaattaaaaattaaaaagctaagccgggtgttggtggcgcagacctttaatcctagcactcaggaggcagaggcaggtgggtctcggtgagttcgagaccagcctggtctccagagtgagtgccaggataggctccaaagccacagagaaaaaccctgtcttgaaaaaaaatttaaaaactataaataatttccatactattgtaatttttacactacaaccgaagaatcctgggctttagctcattagtgtcatttattttttgttttttcctaagaatcaaaaggttctcacacttcaagggggatctgaactggagttacagacagttgtgagccaccatgtgggtgcttggaatcaaacccagggtctctggaagagcacccattgctcttaaccactgagcccttttctatccccaagaaaaactttaaaatgttccaaactttgttatgtcatcattcaagttcagctttaatatttaattaaaagtcattgaaacctgctacaaacagaagaatgcagctaaatgtttaaaagcagtagcaggctgggtggtggcgcctttattcccagaagcactcttcgggaggcagaggcaggcggatctctgtgatttcgaggccagcctggtctacagggtgagttacagcacagccaggactgtttcatagagaaaacctgtttcaaaaaaataaaagtaaaataaaataaagcagcagcaacccaatggcgataaggtcttgttatttagcccagaatattctacaaatccacagcgatcctcttgtcttgcctggagtggtggtgagtttaaaggccacaccacagccctgctgggacaaatgcgattttactgtttcctctgggctgctatgacgcagcttttccagcaggtggcactgcaaagtcgcgggtgcggcgaaaagaccctttggtcaaggccgctgggatccggagttccaagttaccgcagaccttggtgtttttcctgccgttggggttactcgtcactacttgctggtacataaatatttcagtacagggctgagctgcacccgctcagccgtctgaatgtcaccgccagtcacatccaaatgtgggttctgggaaccctgggggagaagcaagtgctccaaatgctggccttctctccacccacacagccagaccctttgacggctgcatccttatcccaaggcatgcgcctcctcccgctagaccgttagtcttctgagctcacctctccaatggctccattgcaccacaatggtcaaaacctccccatacctgtgaagtcgttgccttcaacatctccctctggtcgcttctcctccctctcctacgcactccgggttttctctaactggctgactcctctccccagacacgaagtaaaaagtctgtaaattcccccactttcttcctagccaggttcgcggctcacactgtagacgacctattcctctcctcccacctctgtatctccagccggcacctcttctgcaagttccacttgtacttacgtctctggaaactgtccatgatacccaagcccccagttgccaagtccgatgcctgatgtacactcttgacttactctcctacccgaccgacccaggcagacacactgcaaaacaagccaacgacctgtcaatctacctcctgaatttactctcagctgccttcctcccactggttctggttcgggttcctcctaggatgtctacagaacccaccagtcatgctccccttccaaatcagtatctgtgttgcagccacagtggtctacagtcgattgattttctgccttttagtcatccggttaaatttttttgttgttgattcttgtgttgtttttttttgggggggagggggattcaagacagggtttctctgtattgctttggagcctgtcctggtactcactctgtagactaggctggcttcgaactcacagagatctgcctgcctctgcctcctgagtgctgggattaaaggcgtgcgtcaccactgcctggcaccagtgggcttgcaggacctactctgagtccagtctagacccagcttccagagccgtagagatggtgcacaagcccaaggaactgagtttggatctccaccacttctgtaaaaagctagttgtgggcgggggcggtagtggggcattccttttgtcccggcactcactcgggaggcagaggcgggccgatctccgtgagttctggagagggagtgccacgacagcctccaaagctacacagagaaaccgtgtttcaaaaaaccaaaaccaaacaacaaaaagccagtagtggcagggggcatgtcaaccctagtactttggagaatccctggagttcagcagtcagccattttagccaattaataagctccaaatccagagagaaccttaccctgccctccatgcctgcacaagccagcttccagattgtgtctcaacacttgtggatcaggaccccagtgggtcctatgccactcttctcccagcatttaccacattagaaaaaaaaaagttttttattgcattcatcactcaataaaccaggagctccaccagcagccatttttaccctttttgtcaacaagcagtgattgacgggcatgaattactcaacaaatattcagtgggtaggtccctggggtttacagtatgcttcatcctagctgtgacagttcagtgatacatgcaaataactagttagcagtggtgtctggttgctgtgttctgctgggttagacacttattcaaaataatttgtttgtcccaaaacctctggcaaatagttttcaacctttgctgattgcatcattggttctgagtctggctaactggactcatctggaccacacacagctacttacttcagaatgagagctatataaaaagttcttgcattaagagtcttgtttcgccgggtgttggtggcgcacgcctttaatcccagcacttgggaggcagaggcaggtggatctctgtgagttcgaggccagcctggcctacagagtgagttccaggataggctccaaatccacacagagaaaccctgtctatgtgggggggtcttgtttactctgctagactggctagctgcatgacagagccacagaccactacggtggccaggtacctacttagtgaacacaacccaagcaagagagaggaaagatttgagcatttgagcatgagaaggaaatgaaagtttctccctgacttcaggctagggcatgactttccttccccgtgacctgtctgtcactaaaacagatctttgcctcgtcttgttttcccataaaatgagcaatgacagtgaccgatctttttaatttttaaataatttatttgcattttatgtacattagtgttttgcccaattgaatgtctgtgtgaggttattcaatgccctggaactggggttacagacagttgtgagctgccatgtgggtgctgggaattgaaccagggtcctcaggaagagcagccagtgctcttaatctctgagccatctctccagcccagacagtgaccaatctttaaaacaatattggctcctgtgaggtcttcagctcaactccaccgcagcctgactcccaaacgcccaggtgtcaacaggagacagtgagcagaagcatcgagggaaaagagtaccaacagaatcctcactttttgctcttgtctgtgaaactcaagaaccctacacgggagactggacttttcttagttgaggtttcttcttttccagcacattctgtgtgatcttcatacatgtccacatgctgtggtcctaacaccacgtggcagtgcagcctccaggacttgggtccacaccggagccatcaaagggagtaaacttgaaggaacacatgggcggaggcctcagccttttctcggggaagttcctttctctttggtgggccaatcagggctgacactggagaaaacactgcccacccaggaagctagccgcggggtccacactcccactcgaaccatacaaactgtggctgccccctccctaacattgtcccaggcaccttccaatcctaggtgagaccttaaagattctgagctccatacccagagtaatagagctcagaagttggttctgcgctgacgagcattttgtttttatatgcattgatgttttgcctgcctgcatgtatgtctgtgtgagggtgccagattccctgtgactggagacacagacagtgagtgctgggaattaaactcgggtcctgcagaagagcagacagtgctcttaaccgctgagtcatttctccagtccagctctcagtccctcaatgagatgtgacccttaaagaacaaactgctctgctcaaactttgaatgtgcgcactcgtttgctggcaagaactctccacctgtacacacctcactaacattttcacaagtgtcttggtatatttatgtctcacttaattccagaattatactctaagtccccaggatttgcaggaccagacacacccatcttaatccaaatctgtgctccacgaggtctggtcatggccagtcctgactcttgcatcatacagagcattttgtgctatgcacaggtccagacacaaactcctgataaatatctgctgagtggaaaattcctattaacctctgtggctccttcacccaaaaacccgctataacccaggccaggcagcagggggcgcccaggacacagctcaaaggcaggtgagcctgcctagacctcctctgcccagggggactaagtgctgtgtgggagggaatgtcagcaccaggccctaggtaactctgcttcccagagagaatggtgaaggcaaaccgcctcccagcctcccacagctgtcagccgctctcactacagacgacagggaagggatacaaagcagaccatctttattcacaatcagggtggccatggggaagacctccagctcagtccaaaagcaaagctaccgaggacaatggagacaggaaggggggctcagcactcgccctcgcccagcagggcgtatgggttgcgggcagctaggcaggacccagggcctgaggttggggtgtcctcatcgccttctccttcttcatcagcatcccggtcttcctctccttcctcctcacaggagctgctcagctcttcctcctcttcctcctcctcctcatctcctgctggccccaccctaccctgcaacaccaccagctcagtcgtctccgcatgagtctcccaggtacctgaggaacacaaagacgtgtgtgagcaagagagaagaggcaattcttcagagggctagtgtgtaccccttcactctcccagccatttgcagagcttgacaaagcttgtgcatcttcaatccccagtcacccatatttgcagatcagtacgatatcatcaaagctggccccgtcgtgaccctctgtctggcctcacctgtcagcagggactgcagagaacaccgggctctcacctctctgttcactgtaaccaggtgggtggaagcacaggctgagacggccatccacagccagccgcagaaggctgttggctgctctgtacacatcattgcgagctgccttggctgttttataacctcgtttctctgcccacgctgaaaggagaaaatcatgtcagtaagggaggcccgtgaactaggttccagtcctgtcagtcccacacagtccaggcatgaggaaaagacacctggggtatgagacagcccccttcccccaggccagaatgttcattgggagggcagggtaggcaagagacaaatgcagagaccatgaagcctaccttcgcagatgtcccaggcacaccaggggtgctccgctgaagggtcctccgcctctgggtggcgcaggtgcagcagagcctgcacggggattcgggaggccaggtaccccacagcagtgtagggctcctggatctgagagatggggtagattccagccagaacctgtggaaacagcagtcactcagcaccttccccagctcagccttctccccagccccgtaacccaacacacctgcagctgcctgggcagcagagacgggaagataaggcccggacagtcgcagagcttcactgaaggggtgagaaagtaagtctggaagtaccgggtgtggcctggcgttctggagacactcaccaccttccgccccaccagcccgttgatcagcgaggacttccccacattggggaaacctaggaaggcaatgcaagggattatggaatagcccttactctgggccagagaggctgtcaggggaggaacagcttggggtaacacaaacacacataaaaactaaatctaagactaaaccaaaccccacaaatatctaagacattaaatagacaaggtctcttgtcacctcttataccccccaaaatgagaagagatcttagaccccaatcacacattccttttcctctacagcagtggttctcaaccttcctaacactgcaaccctgtaatacagttcatgttgtggtgacccccagccataaaattttcactgttacttcgtaactatcatttagcattataaatagtaatgtaagcatctgatatgcaggacatctggtatctgactgctgtgaaagtcgatcctcgcaggggtctcgacccactggttgaaaactgccactctactgtagaccaggctggccttgaactcagagatttgcctgcctgtctccaggtgctaggattaaaggcgatcccaccacacctgcgaccaccctgaacagggctctgacctagaggaagctgatacttctgccctcctgctatgacttagggatccctgtatgaggaaccaacactcacaacggaacaatgactctaccagtcactcagggcagtatataagaagcatcaggctcagcactgcgcctgccattcctcacctcccttcttgaactgtgcattggcaaactcattcattcactagaacttaagcacagtgcagtaggttcccttcagtccccccaggacggacagtggggttcttcccttgaagaacctgcagcccaaatattcctagcttcccccctccagaaacactgaaacacagtgcctaaggaagccatatggcaggcagggcccnnnnnnnnnnnnnnnnnnnnnnnnnnnnnnnnnnnnnnnnnnnnnnnnnnnnnnnnnnnnnnnnnnnnnnnnnnnnnnnnnnnnnnnnnnnnnnnnnnnnnnnnnnnnnnnnnnnnnnnnnnnnnnnnnnnnnnnnnnnnnnnnnnnnnnnnnnnnnnnnnnnnnnnnnnnnnnnnnnnnnnnnnnnnnnnnnnnnnnnnnnnnnnnnnnnnnnnnnnnnnnnnnnnnnnnnnnnnnnnnnnnnnnnnnccgatcttagctgcctccatgtctgcaaaccccatatggcaggcaggccactacgttcttacccacacagccgatggtcaccactccatccttgtagcgctccctggaggggcctgtgggctccatcgctgagtcagtctgctgctctaccaagaccactggcccatcttcttcttcctcctcctcgccagagccgttaccccaggaggccccggccatgtccctagcaatcttctcacgccagctgctcaagtccactgcccaaagaagaagatgatgacgataaataaagggggtttcccttacccccagggcactatggataacacacagttggtatcaccagcatccatagaaaccacagcgagcacatgtgtactagagcagactgaaaaactccccagtctgcactggaccccactcgggagttagacataaaagcagctaggactgggggcgtcaagccatggaggttcctagccacctcctgctcctgtccttcctaccattaggggttgctccttattcaacaaccttcctaaacacacgtaacggagggatattgagaagtgaacccttcagctgcccccaaagccttccatagccccctccaagggacatacatacctttccccgcagtgatggcttcgcaggctcttagcaactgctctggccccagcgcctgagtccatcctctcccccgccttcgattcttcttcaagactgaggtgagagggtgaagatgcatcaaatcaggttcctttgccaacaggcttctctgttcactcacactggcctgctcacctcatccccccctccaccgcctgctccccccaccccgccccgccccnnnnnnnnnnnnnnnnnnnnnnnnnnnnnnnnnnnnnnnnnnnnnnnnnnnnnnnnnnnnnnnnnnnnnnnnnnnnnnnnnnnnnnnnnnnnnnnnnnnnnnnnnnnnnnnnnnnnnnnnnnnnaggggagggaccggagacgcgaaagaggtgaacaggacaatgtggagctgagggtagtgctggtgaaagtaatgcttccaggccaccacaagggccggtggagccagatccaccttgttcaagaccagcaccagggctagcccaagctctccagttacatactcataaagtgctggagggaagttcacaacctacaacagaattggtaagaggacagagtgagaagtgatcccagaggtcgctggctccagctccccatcaccaggtacagtaaaaaacgccaggccctggctgaagtagatgtagtatgggggaagacggtcaaccagccacactgaaaccccagtgggtcctatgccactcttctcccagcatttaccacattagaaaaaaagggagggaggggggaggggagagggaaggaagggggggaagggaggaccagaaaatataacacctggctgggtcaggaacacgaatgggggctgggtgagtggcatctgtttctatgtgcacataactgtaagtgtacacacgtgtacagccacatgcaggaaagtatacgcacatgtgtacacatttgtgttgtgcacgtgatggtgcctgtggaagacctccaacctaaatgtccctgcagaccccccttctccactggaagacaacagtgaggtggcagtcgggaacccaggactcacagagctgtccagcagtggtctacatctcccccaccatcctagcattccaggtatgatctgtggcaatgatgctgtgctacagaaatgagaggaagaaaggcacctttgggctgagcctaagaagcccccagttgccttcaaactccctggagtttggtactgggacttccattggtctagctctggaagacggggaaacagggtgtgtttgtgcgcatgtgtgagcatgtgcgtgtacctgtaagctggccagcagctgaatggaaggctgtggataaacactgagtttcccaggctggcaaagctcaggctagcacaaagaagacccaggtttcatccccatcagggagaaataaaaagaatttctaattaaagactttagcccaaggtataaaaaggaaaaaaggaagcaagctgctgtaacccagcactgggagaggaggatcctagggctatttggtgagctccaggccaataggagaccccccccaaaaacaaagtgacatcgtctgaggaacacatccaaggtggacctctggcttcacaattccaagcacacattctagaagtggaatggcgagcaccgggacacacacttatcagaaacatcacaccaaccctgcttttgagcccccaccccacccacctgctagaacctcccttacagacagacccctctgagcacttaccggatgtcggatgtcagtgatcagcaggacgatgtcggacatttctaacacccgccatagctgcctccatgtctgcaaacatcagaagggagtttggcctgcagtccttctcctgccccagcccggaacattacacaggaccacaactcctgccccccaacactgttacctccaagttgtgctcaaagtagctgagtttctctgaagtgtatgccccatgtatcttcccaaggtattcctggaagctccgctcctcttggctcattagctgctccttggacatctcatagctccaaggaggacgtcggggaaagtccaggactggaaaatgaggaaaaaggtataaggattcttccttctggcagagtttctctaaataacagtcctggaaatcactctgtgcctctgcctcccggagagctgggattaaaggtgtggaccacctttactttaatccccctaggtttttcaagacagggtttctctgtgtaatactgactattctggaactcactctgtaatccaggctggccttgaactcagatttttttttttttttttttgagacagggtttctctgtggctttggaggctgtcctggaactagctcttgtagatcaggctgggctcgaactcagagatccacctgcctctacctcccaagtgctgggattaaaggtgtgtgccaccaacgccgggctgaactcagagatctttaatctttaatcctgcctttgctaggattaaaggcatgtgtcaccactaacaaaaccctgctaggcctttttttcaaactcaaccctgcatctatgatccccccatttcctcccagccagccagttccccctggctgatggcaaacaccaagtagcctctctcacctgaaccaggctgatagacttcccggatatccagctccagcatttcagtactgacaggctgtagcacttgctctctggcggctctctttctcctctccacttcctctcggctgtcccgttcgaaatgcagccggtatctgagggaagaaggaccacactcctagtggaatcctgtgaccacaatctcctctccaaagtaggcaactctgcaaagctctctcccgcggctgttcaggtctcttcttggtagccacccccctcctccccctgaaaacaaactcctgacagcccctctggaaagcaagactgtggcccatcccgagagaaccaccctggcttcccggctggctaactccactgtcaactaagccttgcccgtctttccccatggaagcgcgggtctggcgctgccctcctccttggctcaccggttgggatcgtagcctctcggccccagcccctgggaaggctgctggttgagcctgcggatgtgatgggtcacggattccccatctgaggtgtccgtctgctcctcccgtcgctcccggctcccgctgcggctgttggaactggagcgaagcccatcttgaagccctgaggggagggaccggagacgccagtgtggagaccggttctcggggtnnnnnnnnnnnnnnnnnnnnnnnnnnnnnnnnnnnnnnnnnnnnnnnnnnnnnnnnnnnnnnnnnnnnnnnnnnnnnnnnnnnnnnnnnnnnnnnnnnnnnnnnnnnnnnnnnnnnnnnnnnnnnnnnnnnnnnnnnnnnnnnnnnnnnnnnnnnnnnnnnnnnnnnnnnnnnnnnnnnnnnnnnnnnnnnnnnnnnnnnnnnnnnnnnnnnnnnnnnnnnnnnnnnnnnnnnnnnnnnnnnnnnnnnnnnnnnnnnnnnnnnnnnnnnnnnnnnnnnnnnnnnnnnnnnnnnnnnnnnnnnnnnnnnnnnnnnnnnnnnnnnnnnnnnnnnnnnnnnnnnnnnnnnnnnnnnnnnnnnnnnnnnnnnnnnnnnnnnnnnnnnnnnnnnnnnnnnnnnnnnnnnnnnnnnnnnnnnnnnnnnnnnnnnnnnnnnnnnnnnnnnnnnnnnnnnnnnnnnnnnnnnnnnnnnnnnnnnnnnnnnnnnnnnnnnnnnnnnnnnnnnnnnnnnnnnnnnnnnnnnnnnnnnnnnnnnnnnnnnnnnnnnnnnnnnnnnnnnnnnnnnnnnnnnnnnnnnnnnnnnnnnnnnnnnnnnnnnnnnnnnnnnnnnnnnnnnnnnnnnnnnnnnnnnnnnnnnnnnnnnnnnnnnnnnnnnnnnnnnnnnnnnnnnnnnnnnnnnnnnnnnnnnnnnnnnnnnnnnnnnnnnnnnnnnnnnnnnnnnnnnnnnnnnnnnnnnnnnnnnnnnnnnnnnnnnnnnnnnnnnnnnnnnnnnnnnnnnnnnnnnnnnnnnnnnnnnnnnnnnnnnnnnnnnnnnnnnnnnnnnnnnnnnnnnnnnnnnnnnnnnnnnnnnnnnnnnnnnnnnnnnnnnnnnnnnnnnnnnnnnnnnnnnnnnnnnnnnnnnnnnnnnnnnnnnnnnnnnnnnnnnnnnnnnnnnnnnnnnnnnnnnnnnnnnnnnnnnnnnnnnnnnnnnnnnnnnnnnnnnnnnnnnnnnnnnnnnnnnnnnnnnnnnnnnnnnnnnnnnnnnnnnnnnnnnnnnnnnnnnnnnnnnnnnnnnnnnnnnnnnnnnnnnnnnnnnnnnnnnnnnnnnnnnnnnnnnnnnnnnnnnnnnnnnnnnnnnnnnnnnnnnnnnnnnnnnnnnnnnnnnnnnnnnnnnnnnnnnnnnnnnnnnnnnnnnnnnnnnnnnnnnnnnnnnnnnnnnnnnnnnnnnnnnnnnnnnnnnnnnnnnnnnnnnnnnnnnnnnnnnnnnnnnnnnnnnnnnnnnnnnnnnnnnnnnnnnnnnnnnnnnnnnnnnnnnnnnnnnnnnnnnnnnnnnnnnnnnnnnnnnnnnnnnnngtctgcaagagctagttccaggacagcctccagagtgaaggtggggggagaggggcggcagggcagcgatgttgcagattgcgatgaacgggaagacaatttgtgaccacacttccactggttaggtgaaagtgcagccttctgtgaacctactcccccgagggaaggagagaagaaaaaaaaatatgatgggccaacagttaaggtgaggggttggggtgcgtggaaatcacggggcatgttgtggatgcagcactgtgagacgagagctgttacgggaacctctgttactctctctgatggaatctccactgttttgctcagtctcgaacaacactgcagagggaagggcagatggacggggtgagagatagcggcactgctgagtggatatatctgactttactggttaaaaaaaaaaaaaaaaaacgattgctaaagagcacgtaagaacgagaggatgggtccttggcaccgttctgataactgtgttttcacgtctgctcttaggaccacccagccttctggggcctccccccatggctaatggaaagcctggtgatcccaagtcaggtgaggagaaacgaacgggccctcgtatgtgttctaaatcctgagaagggttggagaaaaattcatcacaggcttttaaaacaaaagtccaggggagccgggtggtggtggtggtacaatcccggcactcaggaggcagaggcaggctgatctctgtgagttggaggacagcctggtctacaagcaagtaccaggacaggccccaaaaatacagagaaaccctgtctggaaaaaccaaaagaaaaaaagtccaggggttgtgttttaaccgatggtggtgtgttaactgtttggaaacatgattaactcctaggtctgaggctttcacagtctgtctctattccagttgtgtagagatgagcattgtccatcatagggaaacagaggctctcagtgggacacaaaactttggtgtaaactgcagtagtatgacattgtggttttcacagaataatctctgttaagtggtactgcttgagagactgaggcaaaagggtcaggagctcctgtccagcctctcctaagtagcaaattaagaccagccagcctgggatacatcatgagctcctgtctgagtggaatcgggggcttgtgaatatatgatcacttaggtgtaaagctgaaaccagagaagtggctctgtcaagtgatggcacctcaatcggatatttatgtatgaactttgaccttgtagtgaaaccaaataaaaacatcaagtctgggtaaactgtaaactaaacaggaataagcaaaaggaagtaaatgactcatggcccccgagtagctgagtgtttaaaccacaggaagaagggctgggagttgaagatcagcttggcctgcataagacactgcctttacaaaaaaggggtggtaggagacacacacacacacacacacacacacacacacacacacacacacacacacacacacacacacacacgagtggggagcggttgcgttgatgaagtgctggcttcatggggtcttgtcaaaagctgggtccagcagagtgaagagtaggcagagataggaagggcagggtttgctatggcttgtgagcatggctaaatcagcaagttccaggttcggtgagatcctatcagtctctggcctctatgcaaacacgaacttgtgctgatcataatgtaaatgggactacatcaaatactgtcaattacacccttttgcctcagtctctcaaatacatcaatttctgtcactctaataacactgttggccagccatgaggacacatgactactcttagtgagcaatatagaaatttgttagaaaaccaaaaattgctgggcattggtgttgcacgcctttaatcccagcactcgggaggcagaggcaggtggatctctatgagttcaagaccagcctggtctacaagagctagttccaggacagcctacaaagccacagagaaacccggtctcgaaaaaccaaaaaaaaaaaaaaaacaaaactgaaaatagccaggcattggtggcgcacacctttaatcccagcactcaggaggcagaggcatgtgggtctctgtgagttccagaccagcctagtctacaagaactaattacggctaggcagtggtggcacacacctttaatcccagcactcaggaggcaggcggatctctgtgagttccagaccagcctggtctacaagaactaattacggctaggcagtggtggcacacacctttaatcccagcactcaggaggcaggcggatctctgtgagttccagaccagcctggtctacaagaactaattatggctaggtgttggtggtgcacgcctttaattccaggaggcagaggcaggtggaactctgtgagtttgagaccagcctggtctgcaagagctagttccaggacagcctccaaagccacagagaaacccttgtctcaaaaaaccaaaaaaaaaaaaaaaaaaaaaaagttaaaatagagaaaacaaaaaaaaaaaaaaaaaaaaaaagttacaatagagctaactgctgcagaagccagcagttctgctttgagatttatatttgcgagatttgaaagcattggggttggaacttttgagacagttgctatgtagcccaggctgccatcaagctaacagaatgtatgcattcaagggatatttcatcctacaaaggaagaaaatattagtgccacagcatgggtgaaccttaagcacactgtactaagaaagtgcatgagctatctaaaatcagattgatagataccacagaatatcgactcctggggctgttgcaaatttaaggaaagggcttgttcaaacaactctttcatagcatgtgaaccatatacttaaaaatagcagatttggaggcagaggcaggaggatctgagttcaaggccaccctggtctacaaagtttcaagccagagccacacagaaaatccctgtctagaaataaatagttgagctgggtggtggtaatacacccctttgatcccagctcttgggagttcatgatctacagaacaagtgccaggacagccagagctgttatacagagaaaccctgtttcacaaaaacaaaaaagaaaaaaaaaaaaaagttgaggtgagtcaggctctgcaggtaaaagtgcttgccagcactcctgacaacctaacttgaatcctcaggccccatccattgtacaaaagatgaattttcctagctgttctctgtcacacatgcatgcacattgatgcctgtgtacacacacacacacacacacacacacacacacacacacacacagccaacacacaaataagatagaatgtttttttttttttaaagattttatttatgtatacaacattctgcttccatgtatatctgcacaccagaagagggcaccagatctcataacagatggttgtgagctaccatgtggttgctgggaattgaactcaggacctctggaagagcagtcagtgctcttaacctctgagccgtctctccagcccccaagatagaatgattttaacagtctctttcttggggctagagagcagttaccaagtggttaagagttctgtggctactattgcaagaggagctgagtccctttctttgcacatggcagctgactgttctagctccagttccaggggatccagtgccctttctttggccttataggcaccagagtgtggtgcaggagcttgaatacactgtactcactttggagcaatatactctgccacacatatcctgtagctgcacactggatgcccacgtccatcagtagagtggacaagtcagttgtgatagaacgctacactgccaagaagaccaacaaactaccactgcagacaaacctgggtgaaatctcaggattcatgaaggaagccagagttcaaaaccaggcagagattcacggccgtgtcaccttagaagttaggctggagatttagctcagtaatggcctagcatacacaggctcttggtgattgataggaacccaggtaaagatgtggtagttgacttgtgtccttgcaggatgtgtcagaatgctttgctgcagccagtgggggaggggctttgggcagggatcagctgcccagcagtcaccctgtctttctctctgcagctcttcacaggggtcctccagggtcaaggggaccaatgattccaccactgctgagcctcccacctcctctccggggcagaggccctattcgaggaggccttggtcctagatgtagcccatatggtcatggttggtggggtgtcaatcccgaacctccttttccccgaccaggctatgggggcccctttagggaaagctttcacacagagccaagaaatccacaaaggttcaaaagctggtctcttaccaagaccatctacccacccaaggatggcccccacatgatagaaggtaaggccggccctgttaacgcctctgccttgtcctgaatgccagcatgctctccctggtctcttctcctttgggcagtacctgagcagcactgataattaatgtgaggcctctcctggactaaggactcctccaccactgatgccagcttcttagctggcacatacaagtagtccctgatcatctttcttcccttagaatgtctctccaaaatacttggtggtctgggagtcttgctcagtggttgagcaagttcaccattgcatgcctaaggctctgtgttctacccctgacaccaaaaccagaagaagtcaaaatacttgtaaaacaatgtgtggtagagaccttggcttgctctctgcactgtttcaagctctttcttgggattgggggtggagagtaggggaggaaaagtgtctccgcctcctgcttgctggggtcagggtatgagccacctcgtccagctcttgctaggttctaagctgtcgttctcacttgttcacagacaagtctgaccgccctgtttgccgacacttttccaaaaagggccactgtcgatatgaagacctttgtgccttctaccatccgggcgtcaatggacctcctctgtgagactgtgcctccctcccacccagtggccaggcatcccctgtggctccctcatagctacttgaagttcttcttcacctccagtcagtgacatgtgcaccccattcatcatttcccccgtttggggtccagagttgtgattgtcactggagtgcggtgcgtgccgtcttctgatccaggctccagagaccatcgggaccccgtcttgctcccttccactgcctcctggatcttcccctctggcaaatgactgctgaacaggaaacctttggtgctgtttgttgtgcatctgcccccaggagacaccaccccacccaccccctgttgcagtcctctgtcctttgctgcttgtttgaagtcctttggcgtgaagcccccaccggtgtttgagctgcccatgaaatgcaccgggttgtctggccgtggggtcaggtttgagtgactggtacaggcttgctcccccaccagcctccctgcccacctcccttgcttttggacgtcctagtttcttgtcagtagcatgaaccccaccgctaaggcctgtggtcagtgttttttgtgaaactgtgctcccctcgtagccttcctcagtgtctgacatcttcgtgacttcccagcactagataagtttctctgccaaatggagcgaggctcttggtgccctgtagactttgcctacctcccagcatgggagactgagacttcctccccgaccgtctgttgtgccctctctcctggtgtcagttgtcagtcgttctgggtctggtgaagcctcaggcgggcatcaccacccagctcctgcctggctcgtttcagttaggccctgtcattgtgaggccaccagcccttcatttgaatcctgtgactccacctggccttgtcctgtctttggtggaacctggacggtagtagtgtcacctctcaccctctcccctcacatccctggtattgggtgttttctgtgaaaacagcagtgagatgttgggtgttgagctggccctaaggaaggccaggaggtgtgggcaagagagtgagagttggtttgttttttttttttcctttttaattttttttatattagtaataaatacagtggaaactggtgtttgcccctcgattctgtgttgtggtcatctgaagtacaggtgaggcagctaggagtccactcaccccttagttcatcggggccagcagcacagttgcaccccggaaacgattggaggagcagattcggcagtggcaaggagttgaggtctgaagggtacccaggaggaggaggaggaaggagtggtggaggaaagagcaggagaccttggatttgggtctaaaagctaaatcagaagagtaacaattattttgtgatccccccttgtaaatcaaatcgtttagttctccacatgaactttgtagataacagtgccaagttgtgtaatgacttcttgttaagagcttggacatgcctgtctcctcaggttggggaacagacttggaaatggagttttttgtttgtttgttttggttttttgagacagggtttctctgtggctttggaggaggaaatggagatttttaaaaatattttttaatttattattttatgtgtatgaatactttgcctgtgtgtatgtatgtgcctgccgtggaggtcagaagaatgcatcagatcctctgggactagggtcacaggcagttgtgagcccccatgtgggtgctgggaatcaaacctgggtcctctgcagagcaacaagtgccatgtccccagcccagaaatgacgatataagttactgaaatgacacgacagagctgcaatggtggtgtaggtttggataatggagttgggaaaatgatgtttggaacaatcaaaatgaaagcatttggagcaggagaagatggctctgcagttaaagcctgaatctggtgcccagaacccatgtcacttccagaggattcggcgccctcatctgacctgagagcaccaggcatgtactcagtgcgaacatgcaggcaaaacacatgagtaatttttaattttttttaaattttatttgtttgttctgtatacaacattctgcttccatgtagatctgcacaccagaagaaggcaccagatctcgtaacagatggttgtgaaccaccatgtgggttctgggaattgaactctggacgagcagtcagtgctcttaacctctgagccatctctccagcctccaatttttaaatttttaaaagactttcaaaagattgagcttggaagctcaggggcagcggccagcaaaggagggacaaggctggctccagatactaggaaaaagtatttgagaaatggagagaaagtgacaactgccagatgtgctcggagaacaggacaaagaccattggtgtctgacgtgtgggtattgggacagaagcatcataggggctgggaatatggctcagacggtagtgtttgatagtatgcttgaaaccgtaggttcaattcttagagcatataaataggggctggataggtggctcagcggttaagagcactgactgctcttccagaggacctgggttcaattcccagaacccacatggtagcgggcctaataccatcgtacagacatccacacaaacaaaacatcccaatgtatataaaacaagaataaagtattttcaaacactttttaaaaaatataaataaaccaggcatatcaacacaggtgtgtggtcccaatactcaggagggaggtggagaaaaaaatggggaatccaatgtcgtctttggccacttagtggacttgaggcaagcctggagaaaaagaaaagcatgactaaggatgggagctgacccagtcattcattagagttagaagccaacctatcttttaaaagacatgtgcttcaaagtaggcagaggcaggcagatgcctgagttcaaggccagcctggtctaccgagccagttctaggacaggcaaggctacccagagaacccctgtcgaaaatcctccccccaccacctccccaaagaggtatgtttatcaaagcttaccaagtgttccttgcttgcctgccgttttattgtattgcaattgcagtgagccaattagagcaaaatgatcgcacatctacaggagcacgcccttaatcccagcactcagaggcaggtggatctctgagagtttgagatcagtcaggtctccagagcgagttccaggacaggctccaaagctatacagagaaaccctgcctcgaaaaaccaataaataaataaataaaacgaagaggttagaaagtagtgggaatgactggagaggtgtactgatttaataaagtgaccagtcaggcataatagtgcagacctggaatcccagctctcccaaaggcaataggcgagcagaactcgaggagtttccaggccagccaagtgctacacagtgagacccaaaacaacaaaaagatttagagcgggatgtggtgaggcacaccttaaactcaccattctagagccaaaggctctctgggtcggatcggaggccagctcagggtgacacagtgagataaaagctgcctcacccactccctcccacccagaaattacgtcgctccttgggtgtcaccgcgtcgccacaccagcagcggctcaggcgtggggaccgtcataacgcgctgcgggctnnnnnnnnnnnnnnnagccggccaggcccagggcgagcgggctgccccgagggttaaccctgcgtgggtcaggacggacaggggcacggcactgtcagcgttgggcgatgcgccgcgggcgcgggatggagggaacgagaactcttatttaagaggcaccaagtcactccatggggaggtagaaaagacgcgaaagaaagacgacggcgatcccacaggcgtttgatcggttgtcgttggaacgaacttttattgtttttaaaagacaagggtctctctacatagggctggcttccctggaacctcactctgtagaccaggctgtcttctaaaatccgcccgcctctgcctcccaagtgctgggatcaaaggcgggcgccaccgccagaaccaccgccaccaccacgacccggcttagttaagacaaaatcttaggtagccaaagccggccggatctcttatgatcagtttattacagcaacagtgaaaagtggagggtggcttgggtcaagatagactcgggaacaccgcttacccaggctctggcagtgacttctgtaagaagggcaaggaaacagtaatgccttggagacagaagtgtcactgtccagtggcctggaccacacccagatactgactagataaagggtaaagactgaagaattccactctattagtcaagatgcagttaaaggaataggtaataggctattggttgataggagtacttgaaaaaatatttttaattaaaatatttttgtttttatatattttttaggcagggtctcactatatagccttgactggtctggaactaactttgtagaccaggctggttggaactcatagagatccatgtacctctggctcttgaatgctggtattaaaatttgcaccaccatgtctagctggtgggggagagaattacttatgtgaatgtttactttgtactgcatgcccagtgagggcgttgggtctcctggaactggaattaaagagggttgatagctgggaactgaatccaggtcctctgcaagagcaagcagccagtgctcttaactgctgagccatctcttcagacctggaaataaaaccgttttttgttttgttgggttttgttctgggttttgattgtttttgttttgagacagggtttctctgtgtatccctggctatcctggaatttactctgtagaccaggctggccctgaactcactgaaatcctccgcttctgctgctgaagtgctgggatccccctgctccctgaaaataaagtttttaacaagaggggagggtattggactgtaaggtggaaaacatttaaagagggtgtggggtgttttgttttgttttgagtgtgtgtgtgtgaatgttttgcctgcgtgagcatatgtgcaccgtgtgcgcgccttgtcagaagagggcttctgatccccagagactggcgttacacttggttttgagccaccatgtgagtgctgggaatcaaacctggaccctttgaaagagcagccgagtacaccaaactgctgagtcgtgggtccggtgcctgagtcagtgttttcctgagggaggagcaagtttggtccggaagtcagtggacaactttgcaggcagttgcacctgtgtggaggctccggggattgaacctggctctttgagctgatactctccatgggagccaccttgccatcccagtgtgctttgaaggttgagttggaggtttctaagagataacaaagacaaatggccagctatctctagtgagggaagaattgaagtagttatagatgaagcagcctagacagtgcagatgggagtgggaacctcaagaacctccccaataagggttagtcagtcagcacagagggtgagagcatggctgcaagagcagccagagaaactagaggcaactgaggagacagacagtatcacctggccaaaacacaaacaaacacaaggtatttgttaagaatccatacccagtggggtgatggcgctcacctgtgcacttgggaggcagaggcaggttgatctcaagtttaaggccagcctggtttacatagtgagcatagatagccagggccacacagagaaaccctgtccctgtgtaaacccagcagaaaagaaaaagaagtgctacccagaccagactgctagccctgagtgtttaggatctacaggaatggattaaacactcgggcataggatgcaagtctaaacataaaattcacttttgcttgatttacactttataaacacagatgagaggttttttggttttattttaacacaaggcctattactgcccaggctggcctttaagcccatgtacagccaggaatggtcttgaacatgtgttgctccagcctgagccttgaagtgttggtggtacagacttgagtcattataaccagctataaagtggagaatagccttgagccggtcaagatagtctcctcctccgctcttgttcattttgagacagggttcaaacccagttctccttcctcagcctgcctgttaacctggattacaaataatgggccaagagtgataacattaaagcatttccttttgctttgaggctcaggacaacttaaggtttggaagaggagagatgcagtgcagctccggtccgctgacctctgtgatatttatctcctcacatttagaatttagagaatggagctatgaagtcaggcgtgctggctcacacctttaactctagcacttgggaggcagaggcagatccgcctgcctctgcctcccgagtgctgggattaaaggcgtgtgccaccaacacccggttgtcctaattttactaatttgaggtggggttttttggggggaaggttggttttgttttgtattttttggttgtttttcaagatgggggtttctctgtgtatctttggagtatctttctggacttgttctggaagtcactctttagaacaggcgggcctcaaactcacagagatccaagtgctgggattaaaggcctgtgcaaacaccgcccggctccgttaggctttgaaactctaaaatagatttttcatatctccagggttgttttgttttgtttgtttgtttgttttgtaggtatttagtaagactttcctaataaataaggactatggaacacgtggaattctgatctaagaatacttgtggggctgaagagaaagaaggctcagcagttagcacttcctagatgaccttggttcaatccccactcccagctaggtatagctctagtcctgtaagatctgtcgccctctcctggcccccttgagcaccacatgcagataaaacacccatacacataaaatagatgtatttttttttttaaagaatgcagtgatagcagagagctgcttgtgtgtcacaggactgagtaccaaactgctatgagtgagtgtggtcattcagaagacatggttgtaggcctggccatgaggggagtcgtgtgatcccttctgcctctggatggagagtggcggttgctcgtagaccgctgcctggagtgacacattgggcaggagtggaatcagtctgactccctttgctccctgagagacagatggtctttcggtcactctctgggatgcaagaccacacaggaatgtacttcatactgcatgtctgggcacctctccaccctgtgcattctgcccccgtccctctcctccccccataaaaatactgaaatagtctcagcagatttctccgattttcttgtcccctcccgtccttgccccactctgaagtggatgcaagacttgaaggtgcaaaagatcatgcaacacattgtggttccttacccgactaaaaagcccctgcctgctacctgatgctgttccgtttgacctaggtgtgccagctgtgtgtttcttctttctcacagctgatctgaacatgtcactgtgcctgacagcttctctaggcttagccagctgcctcctccacggggccatgcttggctctagacctgaggctagcctctctccccaccagatctgccctttcttccccttgggcaagttcaggaactgtctctgtaaagacctgtcttccaaaggcctacaagcactgggggaagccaccgtggtcttattcgctgcttgcacccccagtgcaagcattttctgacgcctcatgtctgtttaataaataggtctttgtaggacaggacagatggcgaatgatgacaagcacttgctgctcttgcagaggacacgttcatggtggctcatgacatccgtaactccagttaggtgggatggtaggctcatagtgcacatacacacgatacttattttaaaaaatctttaaaaatgccttaaagtaataggtgtttgtgtgaatggatgaaagtagaagtgattgtttctgtaagaccagggagtgatgaccagactagttcttcatggtagagccagttggagctctgcaggaagcttggactgctgggcattagaataagctaatgtgatgtctgtttaaccttccagagaaagtggtgaagaaaggcaaaaaggacaagaagaccaagaagacggtgagaaaatgggggtccgggacaagaagtgacgtgggtgttggttcccaggcagtgtagatggccatgtgaagtcaaaggggggatctccctgggagaaggtgggtgggttgtttcattaactcatgaagcaggagcacatgggctcatgtgaaattctcaaagagttaatttttttaaatttattcatttttattttatatgcattggtgctttgccatgggtgtcaagtcgtctggaactggaatttcagactattgtgagctgccaagtgggtgctgggaattgaacccaggtcctctgaaagagcagtcagtgctcttaatgactgagctgcctctccagctccaagagttaatgtttttgcgacagggattctctgtagctttggaggctgtcctggaactcactcttgtagatcaggctggtcttgaactcacagagatctgacggcctctgcctctcgagtgctgggattagaggcgtgggcaagagttaatatttttaaaaactcaaaaagatgtgggcagtggtgatggtggtgcacacctttaatcctaacactcaggaggcagaagcaggcgaatgagtgagtctcttgggttcaaggcaaacctggtctgcagagtgagttccaggacacccagggctacacagagaaaccctgtcttggggggtggggcttgcaaagagcaaatactgctttcttgcagttgtggaggttgagaagtatcaatggactcaaagcttcggtgggcatgcgtgtatcatcctttgtataaaagtggaaatgaaaggccatggggatcaaacatgagtgagagccagcatggtgaattaaaataaaaacaaaataatcaaacatgagtgagagccagcatggtgaattaaaataaaaacaaatgaccactggcacttttaaatgagagagcagcaagatgaggagggcctgcatgcagatggctaactagcctttgaacagcttgcctgtgtctcaccctttgtagttctttgaggagctggccgtagaagataaacaagctggagaagaagagaaaacacagaaggagaaggagcagcagcagcagcagcagcaggtatgctagatgggctggggatgccagggcaccatggacccagctgacaggacctcagccgactctcacactctcatctcagcagcagaagaaaaagcgcgacacccgaaaaggccggcggaagaaggatgtggacgacgacggggaagaggaggagaaggagctcatggagcgtcttaagaagctctctgtgccagccgttgatgaggaccagggtaagtttcttgaggggacactcggaggtggtggcacaccccaaacttagactgaggcagaggatctcttgagttcaaggccagcctggtctacaaagcaagttcagtgtagccaggactgttacacagagaaactctgtctcaaaaagaaaagaaagaaacctgaggggtagaggacatttgacatccttgattggcagggaataaggcctcatttcttgcaaggtctttgagttggtgaagtgaaggagccaaacactggaatgttcctgaccgcttcctttcccctgtcatttcagtgtctgccccggttccccgaggagggaagaaagccaaggtgagctgtcagtaggagagaagactcctaagggcagtcgcagccccccccctgacttctgtggcctttccctgtagggtgggaatgtttttgaagccctgattcaggatgagagcgaggaggaggaggaggaggaggaggaaaaacacgctcccaagcctgccaagccagagaagaatcgcatcaataaggtgaggtggtggctccacccccagggcctcctcacagacaagccagtttcctgcttgtaagccacctcatccacatgtgccttgcccgcgccagcagaacccctctctttaacgtcatcagtctgtcagtcatgtggtactctaagagatttaaactcagaatgtgaagcaaaggccctctgcctgcctcttctcttccttttgggacactatttatgctcagcatctggtttgcctgcacctgctgctgctcctcctcagcagcctcctaacccatctgttgagtcccccgtgtcccgtgaagtgtggcaggctgaaatgctggtaaggggcagagtagtgaagtcatctgttgtttgtctcctgcaggctgtatctgaggaacagcagcctgggctcaggagcagacggggtaaggaggagaagtccaaagcaaaggccaaggtaagagtggctgcagggggtgccgacagctctcctgggtggggcatttcatcaggtctgtcttttcctcattagcctcaaaataagtttgcagccctagacagtgaggaggaagatgatgaagaaacaactgaagagaaggagcctcccaagccagggaaggacagagaaaaggccaagaatgcagagcaggtttgtatcttgcggggtgggattggggtgcagtctgttgctgatcagaactcgggtcacagactttgtacaatgaggcactgacacccagcatagtggatcacacctttaatcccagtacttgggaagcagaggcaggtggatctctgtgagttcaaggacagcctgatctgcatatcaagttccaggacagccagggctacacagtgtctgtctcatcttccattttatcccatgggccacatgaagaccaacaggcattgggtcaggcttggcccagaggccagcgttacagcactggatggaagaggaaagggcctggggttcgcctctgatggtcttggtcctgcctgtgccaactgttgactggcgctgtgatagagaacacatctggccgtgctcctggtccgttaccacaccggtgtgctgtagctctccgtacctcaagcaggtgacaccctcaggctgcacactgcacatgtgttcttgacatgttagacaaactcatttgctcccaccctctgctacacttggaagttatgtcatttcttacctgtggttcctggtggcagacattgacaaaggactgcatgcagaccagtggcttgggataattaggagagaggaccataacccatctccagtctgggtggagaagacagctccctgcatggcaggaatcttgaggtttttgtttgttgttgttgggttttggtttttcaagacaagatttctctgtgtagccctagctgtcgtagaactcactgcctcaggttctgggatggcatgcgccaccacacccggcagagccggcggtgtgagaaatccttagtccttgatggtgctgctgctcttgtttgtttatggctgtgtgttctcacagggtgaagaggaagagggagaagaggaagacgggaggacgaagccaaacgacccctatgccaaccttagcaaaaaggaaaagaaaaagctaaagaaacaggtcagcattggtcttcatggtttccgtgggtttgtaaggcgaggtatgaagagagctttgggggctgcttgaagtagagcggctgaaagggggacagaattgtgtccttgagccctgtctcagccatggcaatatggacatcaaacatcctttccctccttctcagatggattatgaacgccaggtggaatcattaaaagcagctaatgctgcggaaaatgacttctccgtgtcccaagcagaggtgtcttcgcggcaggcgatgttagagaacgcatctgacatcaaggtggggtctgagggcccttgcccattgtttacttgagcagaggcctgccctcaccgtgcctatgggctgttggcaaacaagaaggcatgtgaaggggtgggtgccctaaggaaaaaagggtcctgctagcttgagcaaggtgataggaaagccaatagaaaaaagaggagggaaaggggtcagagggcccgccttccaaccccaccgcagaaaggggtaggtagggtcagggtcagggttgggacaagcaggtgtatgcatgtttgtcctgggctcattcattctgttggctgcagttggaaaagttcagcatctcagcccacggcaaggagctgtttgtcaacgctgacctgtacatcgtcgcaggccgccgctacgggctggtgggacccaatgggtaagaagatgggactgaaggggagcaggagggttgcactgggtggccaggtcctcatggcccttgttctccagcaaaggcaagaccacgctcttgaagcacattgccaaccgcgccctgagcatcccccccaacatcgatgtgttgctgtgcgagcagggtgaggctgggggccgggacggttgcaggctaggggactaagggctggaggacacctgatgtgctgcacgggtctggcaggcaggactggcattggcctcttgaccttccccgtcctgcagaggtggtggctgatgaaacgccagcagtgcaagctgttcttcgtgccgacaccaagcgactcaagttgctagagcaggagcgacagcttcagggacagctggagcagggggatgacacggctgccgagaaattagaaaaggtagaggagacagcgtaggggacacaggtaagccttggggggtccttggacccttggccatgtgtcctcttctcctcctccaggtgtatgaggagctgagggctactggcgcagcggctgcagaggccaaggcgaggcgcatcctggctggcttgggctttgaccctgagatgcagaatcgtcccacccagaaattctctgggggttggcgcatgcgcgtctccctagccaggtgggtccgacctctattctgccagtgtctcttccctttcctttcttccaagggctacttagcaagcaggtttgaggccagcgttcaccatcctcacttgtgcattgcgagaacttgggtcattctccattttgatccctatctaataaaaattctcacatagttttccaaccaggggctctgggtttgctgaacagatgccttcctctcctgaccttgactccactcctctccagggcactcttcatggaacccacactgctgatgctggatgagcccactaaccacctggacctcaacgctgtcatctggctcaataagtgcgctcactgccctgcccatgctctcagcctctgtgtcattggctcccacgcttcttcccctgtccccaccctattgtctgcactctgggctcacacccttgtgacactccacactcctgtctacactgcagctaccttcagggctggaagaagacgctgctgatcgtctctcacgaccagggctttctggacgacgtctgcactgacatcatccaccttgacacccagaggctccattactacaggggcaattacagtaagcgcgcctgcccttggtggcttggggacaggtggcagagcctcagtagcagcccctgggcatggtggtgagctgtctcctcaagacctccataggtggctgcttccccgttcacctgtccctggttgttctccaccccagtgaccttcaagaagatgtaccagcagaagcagaaagagctggtgaagcagtacgagaagcaggagaagaagctgaaggagctgaaagctgggggcaagtccaccaagcaggccgtgcgtgcccacgctcgcagaggagggcaggagggcaggatgggagagcccatgggactgggcggcgtctggagcgcttccttcctccctcatccaggagaagcaaaccaaggaagtcctgactcgaaaacagcagaagtgccgacggaaaaaccaggacgaagagtctcaggagccgcctgagctcctgaagcgacccaaggaatacaccgtgcgtttcaccttcccagatccaccgcccctcagcccacctgtgctagggctgcacggtaagggcgccctttcctttggggccaggatctggggtgactgcagagattataagtagctgcttatcctcaggtgtgacatttggctacgagggccagaagccactctttaagaacctggattttggaatcgacatggactctcgaagtgagtttgtcctgggtgacttgggtggcagcaggagtctccgattgaggctggttctctgatcacccatccgtctccttccagtttgtatcgtgggccccaacgnnnnnnnnnnnnnnnnnnnnncccttctcttgctgctgactggcaagctgacaccagtgagtcctaaagccaaaagggagagggaagggcccagcattcaccagatgacaggggacagtgtgtccttgttagactgattagaagtgtgtggggtaggggtggggtgcagagacggagcccagaactttggcttatctgttagagctaacaagtctgaaatttatcccgttgccgttctgcgctgttgagactggctcctcacaccacatcgtagggttggttttgtcatttgtaatactggggttgaacctagggcctttagcacgttgtagccttcatcttgttttactttttattttaagataaggccttgctaaattacccagagtagcctcaaatgttgccatccctgtcctttcttagcctcttaagtagctgggattacaggctgatgccacccacctagtgactggactcccagtcactgcaaggaaatctggaggtctccttcagtagtgccctcctcaccctacctctacctgaccgtgtacccattgtttcctatgtgtgtgtttgttttccgagacagggtttctctgtgcatgtggttctggctgtcctggaactcactctgtagaccaggctggcctcgaactcacagagatccgcctgcctctgcctcacaaatgctgggattaaagtcgagtaccaccaccatcaccaccaccccagccatttttcctttcttgtattcatttattcccagcccaactatgagatttgtttctcctaagaaaacattgaggtagcctggtggttcctagtcaaaagctcagcactggggagtctgagacaggggcaatcactgtgaattcaaggctagcttgagctgcaaaataagactatcttaaaaaagggagggggggggctggagagatggctcagcggttaagagcactgactgttcttccagaagtcccgagttcaattcccagcaaccacatggtggctcacaacaatcttgaatgagatctggtgccctctgttggcatgcaggcagaagactgtatacagaataaatatcttaaaagaaaaaaaagccccctccccaaaaaaaaaagaccaagaagatattaaaaaaaaaaagaggaagagagggagggaggtgctagagagatgactcagaggttaagagccctggctgctcttccagaggacctgggttcaattcccagcaaccacatggtggctcacaaccatctgtagtgagatctgtaatggtgccctcttctggcctgcatgggtacatgcagacagaacacagtatacaaaagaaataaaatttaaaaaggagctgggcgttggtggcgcacgcctttaatcccagcacttgggaggtggaggcaggtgaatttctgtgagttcgaggccagcctggtctacaagagtgagtgccaggataagctccaaagctacagagaaaccctgtctcaaaaaaaccaaaaaaaagggggggggctggagagtggctcagaggttaagagcactggctgctcttccagaggtcccaagttcaattcccagcaaccacatggtggcccacaaccatcagttatgagatctggtgtgcaggcatacatacaggcagaacattatacataataaataaatgactcttttttaaaaaacattaaaaaaggaaaagaaaaactgggctgtggtgtcgccgccctcccgcatccctgctcttatgcttgctttttcttgcagaccaacggggaaatgagaaagaaccatcgtctggtaagctggctgtgggactgaggtgtagaagtctggcaggaagcaggcccctgactgaccacactgaccacctcctctcctcttgggcagaaaattggcttctttaaccagcagtatgcagagcagctgcacatggaggagacccccactgagtacttgcagcgcagcttcaacctgccctaccaggatgcccgcaagtgcctgggccgctttggcctcgagagccatgcccacaccatccagatctgcaaactctctggtaggacctcctgggctccccctggagactgggaggaggaggagcccccgtggcctgaggacagagagaatgtggtttgtgtgggcaggtgacagggatctgattgcctcttccttttgtggcaggtgggcagaaagcccgagttgtgtttgctgagctggcctgtcgggagcctgatgtcctcatcttggtgagtgggcctggcacaggaaaggggcttgaaggtaagagctgcagacaggtgttgcagtgctctgccatgggtctcttcttctccacaggatgagccgaccaataacttggacattgagtctattgatgccctgggggaggccatcaatgagtaccaggggggtaagtctgctgggggggcagacaaagcagtgtggactggggctcttcttctccacgctcgattccccctcctgccctgtctttatcatctttctccacagctgtgattgttgttagccacgatgcccggctcatcacagaaaccaattgccagttgtgggtggtggaggagcagagtgtcagtcagatcgatggtgactttgatgactacaagcgagaggtgttggaggccctgggtgaagtcatggtcaaccggcctcgggattgagctcccctcctggaaaccttctgagacaagctcctgtggctggggtctctgcctgtacccacccagacgcccgctgtgtctgctgccaactcagccacatgggccatgaaggtggagtgttgccttgatgcgtgtgacaggatccgtgtggattgtgtccttcccaccgaaggactgtgtctccttcagataacagaactggcttaccctcagcatctcttgccagacagaggtgacctttgctgtggtccattcttctcaagccaagttaaggtggcctcttgtctcaagactctggccactcaggactgactctgcctggtccctccttttggaagggtcctcactgacacaagcagccggaaccacagcacggctggaggccagtgtctgagacctgttgtgtcaccaacccaagatctggtgcttgtggtggcttgtctggtgggggcttgagggcaggaaagggagctgatgaagtgcagtctcctttcagagggggggaaataaagcactggggttgctgacatcctgtccctgtgtggagtctcctcagcttttgctgttccgtcctcccctgccagtgtgccctctgtgccctcagggagggggtgtgaccgagctgatgatctaagaccaacagaccatgttgggatagggcgcacacctctgattccagcgcccaggaggtagaaggagggcttcccttggctacctagtacatttgaagcaagccttggctacaaagactcaaaaactaaggcatggacatttgtgacatatctgacttccatgtgtgtaatatttttggttaaagattgccatgtgtccagaaaggacagatttccagatttggagtcgcacttggaacaggagtgaggcccagagcctgtccacctgggagaagcaggtccagtgttcagggaaacacttgggactggtggagagaagggggaaatggggaaaacagactaaatgtgaagtgttgaaggagaaaggaatgaatggttttccagggcaaatacagagtccagtgtggaaaaattattttccaaggagtcacaagtgggatgcagtgagcacactgagtgtgaagggatttttttcagtccagccactgtggagtacttaaggtgactggttgaccttgaagctcttccatgtcttggtccagtggagctggtgtcgggggcctctgtggataatctaaactgtgacactattgcttctgctcctgcttcatccactcactccgtctagatgagacaatgcaggaattatggagtgttggtgatttagtgaatatcaaggacttggatgtgagtctgagtggtgttggctcacacctttaatcccagcactcaggaggcagaggcagacgaatttctgtgagttccaggccagcctggtctacagagcaagttccaggacagccaggatacacagaaaaaccttgtcttgaaaaaaaaaaaaaaaaaaagtaccggctgcatatctgggggacctaggttcaagtctgcaccctaacaactgtaactctcaccccagtagatctgacaccctcttctggcctgggagggtcctgcacacatgcaatgcacacacattcaggcaagcactggtgcacataagtctttgtgggctggagggatggctcagtggttaagactccttgatgctcttccacagactttgagttcctagcacaggtatctgtaactccagcttccaaggggatgcaaggacacttgcactcatgcatacaaccccacacagacacacataaatatattttatttattgcagtaaagagataccatgaccaagacagctcctaggaagcatttaattggtggcttggttacttacaatttcagatgtttagtcttatcaccatggcaggcatgctatggtgctggagtagctgagagctacatcctaatccaccagcagcaggaaaagagagcctttcaaaaggctcaaaactgagcagcacacttcctcaaggtcaccccttttcttttcaaatagttccactcctgatgactctgaactccctcatatatgagcctaccggggccattctgactcattttcatgtacgtatatgcacaggttggtgtaggggtgtggggaggtgcaaaggccagaagagggtgtccaaattccagctgctggaattcaaggcagctgtgagccacatttatcaggtgctgagaattgaagccagccccatggaatagaagcagacgcccagagtcatcactccggccccttgaccnnnnnnnnnnnnnnnnnnnnnnnnnnnnagggaaaacattgagctctctttggggagtcttgggcttgtaggagatggggagaagaagtgatggagccttgaagaggtacaagaagcgctgtaaccacaggctggttgattcccaccagcttttagccatggtacttgtgagagttaagaggttactgccctcgtgtggccgatactggaaataacactcaagacacctgcaaactcggatcctgtcaggcccctcggatggttccaatggacacacagcaatcaggggccactgttctgctgcttacatcccagactcccctccttccctaagtctgtgtacccgacaaggcccttctgcttcttttcaaatcctgttccatcagctagacacggggaaccttttctgttttgagacagggtctcactgtaaagctctggctggcctctaactcagaaacctgcgtgattccgcctcctgcgtgctggatggaattaaagagagtgtgccatggcaagtgtatggaggtcagagtacaattgacagagccattctctcccaccatatggagctcttctagactttaagcatgactgttttgcctccttgtaattatgtgatatgtgtatcacacatatgcctggtgcctgtgttggtcagattgttctagttagtgtttctattgctgtgatgagacatgactaaaagcaacttgaggagagagtttatttggcttacacttccacacctagtccatcattgaagaaagtcaaacagggcaggaacctggaggcaggagctgacagaggccaagggggagtgctggttactggcttgttcagcctgattccccccacacacacaccaagacagggttttccttgtgtaacagccctggctgtccaggaactctttgtagaccaggctggcctcaaattcagagacccccctgcctctgcctctagagtactggtataataagcaccacacctggcatttcagcctgctttcttatagaacctagggccatcagccaagggatggcaccacccacagcgtcctagcaatcgctagttgagaaaatgccctaactggcttgcctacagcttggtttcctgccttctcaagacagggtttctctgtgtagtcctggctgtcctggaactcgctctgtagaccaggctggcctcaaactctgcctgtctcttcctctggacataaaggtgtgtgccaccaccactggccagcttgatcttatgatcagttgaggcttcctcttctctgattgactctagcttgtgtcaagttgacatgaaactagccagcacaggctggagagatggctcagtggttaagtgcactggctgctctttcagaggatctgggttcaattctcagcaaccacatggtggctcacagctgtaactccagttaactccagttgagaggacctgataccctcacctacacataaatgaagaaaaaacccaatgcacatataagaataaacagacaaatgttttttaaaaagccaggaggtggtggtgcacgcctttaatcccagctctcaggaggcagatctcaagtttgaggccagactggtctacaaagtgagttctaggactgccagagctgtaacacaagagaaattgtctttaaaaaacaaaacaataacaacaaaaaagcaagagtcaaaacacagcaggggttaaataagctgcttctctttccactgtttattattaatgtacaaaatatacaaaatcaaaagaaaaaactcctcaaatccattgtggttctaacccaagaccctgcacaaaaccaacccactgttttcatagaaaacaactgatgccaagacaggggaannnnnnnnnnnnnnnnnnnnnnnnnnnnnnnnnnnnnnnnnnnnnnnnnnnnnnnnnnnnnnnnnnnnnnnnnnnccatatggggtaaggagcaagcccactcccaaaggcagtgcatgtagtgcgttaggcccggtgcgcccgggctaagttgatgaaagctggtctcacggaagtgtttaatggagtctctaacatggctgtaggcaagagtggcctaacgctgcaggcctcccctccgccagctacttttaactaggtatggatatgaatgtgccctcactgaacctggcagacccacaaagacttgggtactaacagttgcagtcttccttgagaaaggactcaacagtgactggcccatgaggggcacaagagagggtggttccagaactcaattccagccagcttgagccctcagtgcagtgggatatatggtacccctcatcacccctcaccccaaggggataatgagcttggcttggcttggtttcctaagtgcaggtgaccaactcagttccatgtgcaattggagagcagaggtctccagggtgaccagctttaggttctcaggcatcggggctaatactggaaggggtttggggcacagggcgaatctcctcacaaagtgaagccagccgtctcagcagtccagcatatagagtgtgtccagtctctctcctctccagactggaggggagtatgtacatcaatgcgcaccagtgatcagaaacccccaggaacccaaccaggtgggaacggagggggccggctcctcatcagctggggaaaaggggaagtaggcctcacagaagccataagagtgaaaggagcaaggctgcagtccacaggggtgcgggcggggtggggccggcctacggcagcgggggcccattgacccccgggtgatagaaggcacagttgttctcgtagcgacagctgcccttcatcatgaaatgtcgacagacagggcggttggacatatctgtggaaccagagcagaatggtcagaaaacagctaagaggccaccaccatccccaacccgagtcctgagcaactgggacaagccttcaaagacagtgtttggggatctgatgtaaagacagagagtgggagctgccttccttatatacagagaagacatggagatagaaccctaatgttctttctacctctcccttacaccccccaccccgcaatctggtatgagacacttaaaaatctatccatgtgtgggatgagaagtgtcctcacctcctccatgactgtggcctccatcatgccctcggtggccgcctcccccatggccatcatgaccacggtgttcatgaggtggtggacctcggtggtcatggcctcgatgactagggacatcatgcggccggtggccatgaggtcccccatgtccagggccttcatgggggcgatgtccaccaccagaacccattcctcctcccgggccttcatgggaacgatgtccactgcccattcctcctcccgggccttcatgggaacgatgtccactgcccattcctcctccggggccttcatgggaacgatgtccactgcccattcctcctcccgggccttcatgggaacgatgtccactgcccattcctcctccagggccttcatgtgggcggtgcccaccacctccaaccatgcctcctccaccaggaccccctctgccatttgggggtcctcctccagaacgacctcctctggctcctcgaaatggagggggtggcggcggctcatttcctccacgacctcctcgacctctgtggtatggtccaggaccaggtcctggacccccacgcattgggccacctcgaatggggtcacctgggccatcccagaagggatcacctccccgaggagggggtgggggacccaaaagacgtggacctactggaccaccagggcctccatggggacctgttagataaaggggaaggggaaaaaaaaaaaaatcagttatctgttacactctagcactgctgcctctaacctgaccccgtcccactttcggtgatccctggctgttgccatgctgaaaagaagcagtaagcccaccaaatccctctcacctacccctctcacctacctggcatgggccctccaggaccaggggggaaatgctgcatgcccttggggcccccggggcctcctggtgggaagccattggctacaggaccaggacctagaagtccatgtggcactgtaaatgaaaacaggagccagtcagaaagagaactcgaagaatggcatggtttcccacccaagtgtgcccaactcatctcagaccaacctggcagagccatgctctctgtccagttttcccctcccaattcttgcccagtggcaacagtcccatgctcttctgcatctggggaaccctgtttcccccctctgccacagggcatcctccccgggctcctgtggctggccctgaggattacccagcatctgcttgagcttgtctgagtactctggctgtttcagtagttcctctgaagggtggctgtttggactgccctgcgagtaggtaaaatgacagttaggagagtgactgatggccagggcaaagcaagaacatacatggaaatgcagaccaagaaatggataagctgggcacaggtgtaggctgagtcccagaccagcttgggcaacgcagtgagaccctttcccaaaactgaagcccagcactaccctaaatggaaaagaaaccaaacacaagcaaagacaaagctagggtaaagcgtgggagacagcgtgcagagctcatgagtgaggcagcggcgtcggctcacacaccatgatggaggtgaggatctcctggacgttgatgcctcctcctcctccagggccctgggggctcttcccagctcccatgcttcccataagattggccagaaccggaggcagcttggagcctcctgccccatcaggtgagccaccagaccctccaggctccagggtctcaacatacggtgcctcatccatggaacactcctgagaacagaaaaagacaaatcagagctgtggaaaacaccacagaggcatcgtcacatgtttttgcccagcaccgccggtccaccacaccagcgcctacaaagactcacctcatccaaggggatgagcttcgggggtataggctcatagggctcaggatcgggctcatgaggactgtcaggacacgcgccacaggtgaggagaaaaaaaggaatacaagcacattaattcagcccctgaagttcactgaggtgtctccctaagtccccacaacacagtcccatggtacaggcggtccacacctcaggcctggaggcctgtgctcacctctccttgttcaggaagagttcctgaaggatgcccttttcccgctcagcttggatgtatcgctcctgactattgcttccagggatgacaagaggtgagggcagaaccagaggccggggacacacccagggcactttctcctccatgttgtcatggcttagtcgcctggctgtctcaaaagcatgtcggtctgacagtatctcacgcttggctgcctcaccaaagtctttgatcttgttcacattcactgcaaggaagacagagaggccaagagaacaagtgagcaaaactgcccgtgttcaaattctggcacacccccaacgcagggaactggcatctcacctcgttcagtttcatccagttcaaagtagaaatattctctcagcttgccctcttcaggccatgtcactgtttttctctttctgccctttcgagtcagctggctgggatcaccagggctctccacaggcttcgcatccagagctcctggctctgaagaggctgaaaacaagacagattacagaagaggctgtcagcaagctaagatccagcccaagatgcagcctttcagaaaaggctctaacaaggcatcgtgggttacctgtatccatgagctctgggacttcaacaggtggcaccggggtgccaggacgatctgtgtccatgggctcagcagggggcgttggctctggggaggaaggtttggctgagctcggttcagtgcttgttttcccttcaaaagggctgggctgttaggaaagagaaagcatccagtgagcttacaggacacccaggacaacaaagccagggtcctagatgccccatggccccagcccacactctcccagaatgcaccccacacaccctgtcaccaaaacccacttctaggctcacaccttggcagctgtaggtgacagcaccttcttcttctttttaattttgatgcctgggacaggggctgaattgagagcatccaggaaacccaggccctccatagctacagaaggaaagaatagatgcaatgaattgaatgaacttcttcacaattctattcctgcagagtccaggaagaagacaaaagcacgcctgtggggtccctgcccacggtgaccaggaagcaagctttgcacaggaaatcccctttctcccatctttcttttggcagctatgtctttgatgacaattctagaatcaattcattaagcaagctgcacaccagagggtccagccaggaaggagatagctgacaaagttatcatttgagaggggcatggcttcttgccacttatctaatgtggaaggggaaatccctacaaaaaatataggatgccaaaacattaaaggcagagcaaggaaatggctgacaggagaatctccccccttcccacccagaagcgctttccttgtgccaagggccctccaggaggactcacgctgaggggggatgatcttcactttgatctctttggtggcgttgggggttgtgttgaggggcttgtacttcttctccgcaggcggagcagcatctcctggagcagctgtggcactctgccgcttgagggggatgggcttcaggttgtacttgtctgacaccaccacagtgctggagttcttcttcacaggcaccaaagatggggtgtccagctctagtcctggggagaaacaaggtgacagcagttagcgccaaccttcactcactgtccctccctcttgacacccctagatgttctagccttgagtaagtgccccggcttctcctttagccttctttcttcctcagagtttgaaatcacaactaaaactattggctgtgcatattgatggtactgcaaagctggctagcggccttaccagtggagcgaaacttggcgtgactcggtgctgtggttcgcagcgacttgggcttttccttcttcttctctggagcctcctcagccctggtctcggttttcacctcagtcaaaggtctctcaggaagcgtagttcggctttttccctcttccttccgtttcttcttatctttctctgttgtggaaaaacaaagcaggtaagaatctcatttaggaggcagaggcaggcagatctctgtgagtttgaggccagtctggtctccagagaaaacctaccaaaaaaacccctttcccaaaaaaccaaaaaaaaaaaaaaaaaaaaaatctcatttagataagaagactggcagaggcgaagaaccaacctagggtcaccctagagctgcctcttatgggaaagaaaacccctgaggtacagagtcaaggagcttacctgcaggctgggcactactttgggagcggatgacagccatccagtcactaacgaggactgaggccaatttccggagctctgcaggtaagaaaggggaaaaaattacttatttagtaataattcaatatatttccagtaacagaaaataggatgtttacaaaaaagaaatccattgttaaatctgttcgatgggaataacttgaattttttttttttttgaaagatttcaaaagtgttctgtctgcatgcatccctgcaggccacaagagggcacaagatctcattacagatggttgggagccatcaggacctctggaagagcagccagtactcttaacctctgagttatctctccaggccctcaaatccttaagaatatgacatgcttaaaatagaaggaaaaaaagtctaaggcagcccccccccactccttgctgttggggggcaatgacttcaatcaaggtgggaaggtgaaatgagaacagtttacatagagaagaaagatgcctaaaaatctaaaggactggatttatctccactctgtgagaacttttttgtagccttccctggaggaacatggccagcagaaactcttctttggtacttatcttctccaatcatgcagacacatttagcaagcaagatggccacacaccatatagacctgtctttctgtaacagccacacagctgtgacttctgtctcacagcaatgagcatttcatgcatctacagaggaggaagatctccaagcctgtttgcagttgggcatgggacacctctaacctcaacttgggaggcaaggcagaggcagatggatctgagagttcaaagccagcctggtctacaaagaacaaatcaaagatggatggcaatggcgcatgcttttaatcccagtactggggaggcagaggcaagaggatctctgtgagttccagtccaggacagctatggttacacagagaaaccctgtcttggaatccaaaacaaaccaaaaaactctctattcaggggccagagagatggctgttttattcttgaggacatggtagctcctaagtgtctgtaactctagttctgggatctagggcactctctggtctccgtctcttcatgcacaaggtgcacagacatgcatgcaggtgaaacatcccacacagagaacagtaataaaacaacaccctctattcagagtgggaagcagtataagctagctggaagcaggtgacagcaaacccaacagtgaaattaatgacatcatccatcctctgtgtgatatgttctctgaattactaagggtacactgagatatcataaaagttgtaaaatgctcagtatctcaaagaaccaaatactgagaattaataaaactaaaaaaggtggatagctagagtggtttccacttaatacttaggttcttacccagcatgccagggtaccctggggttgggtaacatgtaaacacacacctaacactcagtattgtgacaaaaagtaaaatgggctggtgcctcatgcctttaatcccacacttgggatgcagaggcagtcagatctgtttgaggccaaactgtcctggtgagttccaggacagcaaagtctacacagagactctgtctcccaaaaagaaatagaaaatggaagggagggaagacaggagtaaaagacaacgccatagtacagagatggcagggcatagctcaggtccagggcggacactggcacagtttgggcatagctcaggtccgggccgacactggcacggtttgcacactgcacccaccttcatcctcacttgacttgctcagctgcttcactagttttgctgtgttgttctgtgagaaggaaatgcagatggtaaatgccaggaataaaacaagctcactcagcactaagtaaagtttgggcatannnnnnnnnnnnnnnnnnnnnnnnnnnnnnnnnnnnnnnnnnnnnnngtttgggcatagctcaggtccgggccgacactggcacagtttgggcatagctccggtccaggtggacactggcacggtttgggcatagctcaggtccgggcggacactggcacggtttgcacactgcacccaccttcatcctcacttgacttgctcagctgcttcactagttttgctgtgttgttctgtgagaaggaaatgcagatggtaaatgccaggaataaaacaagctcactcagcactaagtaaaccaccgactgacagtgctggcctactttaacctccaaaacctgtagttttctttctttttttttttaagggtctgcctctctttgtaatccctcactctgtagaccaggatggactcgaactcacagagtttaagtcctgcctctgcctcccgagtgctgggattaaaggcgtgcaccaccaccgcctggcacccagatacattcttaattattgccagagaaacccaaaagacagctcagttagtagagtactagactagacccagttacaggccaactcactcccactttagagatgaaaaactgaggctcagatataccaagggtcatatcaggtcataaatccacacccagtcttccaactccacattcccattttcctcaaattccagactgccacccatgagaagccgagtgaggtctccatcagtcgggctaacccagaaagggaaagtgcatggtgcagcctggaggtacctgcttgagatggtccacagtgagtgggaggtgctgcagggtctgcagaatctgctgcaggagaggaacgttgttggttgtctttgaatatgtcagccagttgttcagaagcttgtagccaccgacatcaataaacctgcaggcaggtgggatcagaatccgttaagcccttcctagttttagaactagcaagctcacatgtccagtgacccagaaaccccaagcctccccttccttccccatcactgcctcccacttacttgaccagcacgtctggggctcgggtctgcaggatgatgttcaagtacgtacatcgactcaccatctttcgtgcttctttcatcagactggaaagagaaggcaagttagatgtggggcagagcatctgctgtcagcaccgactgcccaggctagctgcccctcctgagtgctgggagaacaggcatgacaaacactatgccagctaacgtcatgcagcaggcagaggactctcatcttgggactgcggaatcaatctagagccacctggaagagcatccctcgtgtcccaacacacagaaacaactgcctccaggggagtcagggctctcacatttccccttgtaacctaagactggcttagctgtttgcttttctctggaaaccctgagatctctgaaggaaaaagacattttggataggcacaacatgacccaaaacagagccaagaattctgttataggctcccctgcttgcaatgcatcaggctttcagcccatgactcttaggactataaaccagatctccagctgctatcaccgttctcttgtcaaaatctacctgcgagtggtgcccccccctcccacatactcttctctcttactcatttctgctcagccaggacaggcagtcctctcttctagcgcggagcccagcgagggcggactcacctgaagatcttggcaatcccgtccacactcttcacctctccgtcccgagtgaggaagctgtccaagcccttgagaagttctttggggtctatgggacctgaacccatgatggtggtttctgaggtaaaaggaaaaaaaaaaacaaaaaacccacaagataaataatagcaaagacagtcccactaacttattcctctaatgagtcccactggcacctataagacacagtgactaattaatctatgtccaactgtactattccataggtcagtaaaatcaagtctgtgctcacaaaacagccttggtcacttaagtttggggttaatgcaggatggacctcaaaggcaactcgagtgaaggccccagcagcctacctttcctcagctaaaccctttccaggacaattacacatcaggagagtatctcagggctaagacccatggtaagatgctcaactcttcatgacggaagacagtcctgtctccagttagggttactaacttttgatgcggaggcagctgtagcttcctaaggtaaacaagccaaccctgagtaaacattttcaagaatcaatcattctctctccagaaatcaattcccttttatcttggctatttaagtcataatcacaagtggcaccatgtgtcagctgaagtggttgatgaaaaaaacaagcaagccctgagcagggcccttccccagggagctcagtagctctcagaaacaagagtaactgaaaaggaaagcaggcagactctcatcagctctgaataatgttgctcatcaaacaaacaccaaacaagcttttattgttccaaagttctagagaaagtttgcttgtggcttcagaagcaaagatgcaaacctgaccttctcctgccctcaaaactcaccactgtccaagactcccaaggaaaggccaacgccaagaaccaaaagacataatgaagttgaagatgtggaaagcggacaacactctaaatctggctaggaaaggaatgagttaaaagacacactgcttccatggaaagaaagccatttccaggccagaattccagagagattattaggactgatgtggttctgactgggagttttaggcacaactctatcaccaccagctcctcagaaccaaagacaggagcctcctcatcagcagtgaggtggccaagccagtatgggtaggaaaaaagcaaccccctcccaccccgctcctgcatctctcacaaacacaagggcgaataccagttttaacaaagtaatcattgcattttctacagaaagtaggactcttgcaatacaatagttgtttgttcccagacaaagcaggaaagaaagatgtgttaagaagcgggattgttttcctggctgagacatgcttacccagagtaaagaggctgtcaaagacaacagtggctctctagaaagaccaagataaaaattttgtgtctttaaaaaaagaaaaaaatcacttttaaatgtggacttcctaatatccaggacagcagcaatagcagcaggagagagggccagggaaaggaagggtggccgtggcctctgctctggaggctgaagactgctggctgaacacagagacacacagggaagaaatgccaagcattgagcaaaatttgttaactgcgatcacccaataccctgggacctgaggtcagaggagaaaaacattcaagaacattggaaatgtttacaagttaggggacaaactcaatgaggtgtggctatatgaacacagagagatctccctgtctgaagatagcagtgacttgtggaagcttccgctatagtaccatctgttagactggaaaaggaatgagtgggcccaaagtaatagtacataagcaatctagacttggaaatttaaaaatcctttatacatacacaagcctattagatctccaaatgacaacatatgcagtttgacaagtcttgaattaaacattacattccaggccctctgaacacagctgactgaaggtaacccagaggtaaacattatctcctttgtatgtctacctaggaactaataagcctaactgaaatgtcccttcattcaattgtcagacgagacagagggcagccacctttggagaaactggaccaatgagtaccaagctgagcgatgtctagtaccctccgatggaaatgggacctaggtattttaaaattgccatctgtataaacaaaaaggcacaatagtcaaggaagcatgtttccccttgtatttgggaggaggatggctgaacttgtctcctcatagtaaaatacgcattttctcagtgcctttcctctagtggtaattctttatttgggaccccaagtgccttataacctacgtctccactttcacagagagtgataaggtccttccagtggtaacaaaggaagaacccataatgattagagaagtctatggtgagggcccaaagctgcactggccagagtgggcagggacagtgcgtcccgagtgaggaagcttgtttttgttttgctttaaccagttgccagtctccttgaaggccacagacaaaagcctgtgaagtacctccaccttctaagcaccggggagtgatctacacttcttactagagatatcaaattcctacccaatgtcaaaatgaatttgacttgaggattatttggtttaaaatggtgggaaagcatccatcctggctcgtcactaaacatctaccactgctgaatcctccctccatcacttcaggaaataaggtccatgccagggcactttaaagtggacaaagaagtgccggctcctgttggctgggacctgagcacctcccaaagcaaaacgcttgctctccccttaagtgtcccaagagcttcctggtatgagcccatggtggaaggactgtctcaggtggttcagactctgtgcatttgcatggtaaggctctacttctccctcatccttattttgaaaatctggtaatcctggtcccaggaagactatttggctttcaataaagatacaaaatcatgtccaccatcctgaacctcaaagtcccccaaatagaactctggccacgtcatgagaatcaggctctccaaggttccctagaaagctttgcttttcatcttccatgcaaggaaggtcttctttactaatcccctgctcactagagatcaggaaccccagtgggtggaatgctcagctcccaaggtaggtatgctgcagaggcacctggcaaactgcttaaaagataaaaaagacgtgtggtaaacagacatgtggaagaggccctcccattcaatcagaagtccaagtaataatgagaatccacacccagcagaaaatgagctctgtcaaacccaagaccccataggacaggacaaaaggcttacaaactctgcctagaaactccagacttcaatgctgggcttttaaatacaaaaatgaaaagtataagaagaaactgtcaaagacttgactttgaaaaagttgggaaaaagagataagaaccagacacccaataccaccctcaagggtgtggctttcaacatgcatggattgccacagcactgaccaggtgggacaccaagaggacattcttcttctgaatgctttcaaggaatttctttttagaaggcaggaaaaagaaattcaaaaaggtggctctttggaaaaaagacaggttgtgaaatgtaataccagaaatgttttgcttaccagaaaccgtagcttgactccccctgcctcgagtttacaactgcagcctcctttcctaaagattcacttctcatcctagtgccaacatacaggaactaagcaactgcagaaggtgatggcactgagcacaagagtttattcccaaactgagaggtgagaataaggatgatttataagaaagtcctacaagtaccaacccttccccacatttgcgtcctgagcgcatggcacatttaagcttcgttaggcccaattgtctactcaagttacacaagccctgtgtcttgccccagtctcccaaacctaaagtacagttgggggttacttttccacacctgtcagctaaagcaggcaaggtacatgtcctagtttgtgatgaatgaaaggtgaaataaagcaatgaatgggctcattgttaaacataaactacaactacacgagaaggacagcctccattcctgtactcagtaagctttatccctggaagatacttcataaaagataaaggaaactaaaaacgttttctcccgagcagcaatctgcagagggatagaaagcatctgcttgggggtggagtttccagaggaagcaagctgattacatcatccttcaaagtggctcctcccccttgaccaagtttctaggacagccctaggctgactggcaaaagagaaaaacaaaggagagggacgccatcttgttatggcgaggacgactcagaaattaaaacgccatccagaccagccggtcgcttaactcacactacaaagcactaagttaaaaaaccagaggccatccctccacccccactcctcaatctgacctattttagttcagtttaagagcttactgaaaataaaatcaatatacaattttctgcgggttaagaatttgaatttgcaactgaagttcaatttgctactaccgccgaccaccccaagcctccctataaccggaaagggggaggacttgggacccctcaacaaatagggttgaggtgggaggacaggagaaaaatgggtcaagacacaacctgcaacgccgcttggaagacaaaaggacaaggaaaagtcgccatatttgaagcagggaagaaactcttttaacgacacaaatctcctagaaagctagcattcaattgcactaatggctttaaaaattatacttctgagttccacatttcccaacctttccaccctcttaactgtatccaccaaccactaaaaagtatcaagttaaaaatgttataatcacttttggctttaaataacctatgcaatctgaaacaatcacaagacattctttacctccccaaatgttatattgtatgtacttgttactaatattatattttgccctaaatttaagtgtcttgcaatctttattcctagattgccacctattttaaccatacaatatatcccaagcaaattacattaaaattgagaggatttaacaatcactttaaagacatagccagctaatacttctctctgcccatctccttaccctgcaatctttatgtacagattgcttattaatctggcaaattgaaaggcgctctgcttgtctcacacacaaagaagtgggacttctgggccacaagatccaccatcttttgtatgtgagctcattaacccttttgaagactgctaaccagaggaaggtaaccattcctccttataatagcaaaggcttatgctttggcagtctggatatttgctggattatcaagggttaaccgtcaatatcctcacttgctggccctcccttcaccctctccttgcctgctccacagcagggaagaggcaggtggcaggggagagaacaaaagactgcttagacccacaggacctttttaatggagattttagagacccgattggtccttctccagtattctacatttgttctatggtctcatttcttcctctcattatttttggtttcacaacgggaaacgttgatttcttgttgcaaggctggtttttgaaaattcgacacttactatccaatttttttgcgacgtcagcacctcgggctcagggggagggaggggtaaaattttggaggaaaaaaaaaataaaacaaccaaccaggacccaaactcaattacttggggggcctcattggatcaaaaaaaagtctcttgaaaaaaagtaaagaccaactcagtattcacattcccccccacccaactccttttagggagaggggggttcgttgggaagaaaaaaatttcctgagtggatatcaaaaaggaaatgctggatgagtgagattgggcgggtttgggcggggagggtggttgattatttttgaagttatgtggtgacgggtccttcggccacagattgcaagtcccaagcggagagcgtgggctggtggggtgagcaagacaggtgggaaggggtggaagacacagtggttgggctggtggccgctgctttcccctttcccccctctctcaggatcctttcaagggcttaggtgttgctgaggctcgtttgttttcctgatggccggcctgtctttctccaagaaaattcaacctgggatgaaaagaacacagaaggagaaagatgtaatcagtacggggtcgccttaaaaacaaacacacagctccccagcgcccccgcgggccgtccgggcacacggccgcggcgggcccatcgtggctcccggaggnnnnnnnnnnnnnnnnnnnnnnnnnnnnnnnnnnnnnnnnnnnnnnnnnnnnnnnnnnnnnnnnnnnnnnnnnnnnnnnnnnnnnnnnnnnnnnnnnnnnnnnnnnnnnnnnnnnnnnnnnnnnnnnnnntgggcggccccccccccgcccccggggggagccccgccccccgctccctctcttccggccccttccgcgcccttttgcgcaggcgcgtgaccttcgcgtctgggcacctccctgtcccgcggcctccaccacttccgccccggcccacgcgcctcaccccgggggttggccgggacggctcggcgcatgcgcactggcgtcagcccgctctcaatcgcgcccgaaacggctttcgcgtcacgcgctccgcccgggatctgcgagtcatcgcgacccgtccgggagagacgcgatttgggaggcccgttcgattgtgacgcagctgaaattcgcgtccctcgcccggccccgcccggggacgctgccgtcctgacgcacgtgagcgcccgccttccgcctggcgagcctggcccctggccccgccctagccccgtgtcccgagcatgcgcagcggctcttttgcgcttccggccggcgctacgtaggggcgtgcgtcaagatggctgcctcctgggctcacacgctgctgaggctgctgccctgcctctggcgaagttccccgggagcccagggaaccgcccgggaaagattggcgccgccgcggggcgtccagggtttgcggctttagtcctgtaccgccccccgtcctccaatgttcagccgtgggggaaaaaccagggtcgcctcccggcgtcgtcttccccgagcacctctaggctaagactgggcaggttggactaacccctggacacgcgcagctaattcttaatccttagccgagtggttggtgtctgcggcggggcccaccaggactgcccttcaatcgaaaggccctaagtttaattgtttttcttttacctccgctgtgctgtgctggagacagcctcgcccagccccggggtgagctcttaggtggtgaccttgaactcctggcccttctgcccaccccacccccacacaccctcccacttcattgggattacaggcgttatcctccacgccctgctccacccctaacacatcagtttctcttcggagcatgctcgggcgtatgatggtgctccctgggttgaagtaactaaccctcaagcctgaggtactcaccaccctggaggctcttggcagggcagggagaaatagcttcaaggcttgtccccggcgacactccctcaagtgggactgaagggtggcgacggaggtcacacaacccaagtaatgacagggttggtagctgtaaagccggcgttggcactcaagttttgttttgccctgtggaatgttgacctgcagcattttagaaaactggtcaactcggggacttggcattttcctcccatgtctggtgcgtctcctgctccccataagttttattcccgaatgttatacatattttctctcttccaccggatccaaataatgcatgtcaagcacagatctttgtttgccaagttttttaaatcgttacgtacactggttggccaatcctataaggatctgattggagctagtggttgttaagtttaacacatgatactttaatgtctaactgctgagttgttcttatattttggatgcacgttccacctgtctccccaaagtataataaaccaaataattgcatcgtcttcttgaaactcattctctcatgttattactccctttttaggttcccctccgggctctttgcaccaaaggccctgaagaaggttccctgtcctccctccccatttctccctatgagaatgaaccttggaaatatctggattcagaaggtacccagattggaggcaagggcgggggcagaaggaggtgaccagagacatccctaccacctccatgcgtgaataagctcatctgttttgtgttattgttgtttctatgttttgttttgttttttcaagacagggtttctctgtgtagcttttggagcctatcctggcacttgttctggagaccaggctggcctcgaactcacagagatctgcctgcctctgcctcccgagtgctgggattaaagaggtgcgccacagacaccaggcagctcgtctggtttttatttcagaataccagaaccgctatggctctcgccctgtttgggctgactaccgccgcaaccacaaaggtggtataccaccgcagcggacccggaagacgtgtattgtaagtgtttaagtttgtcaccttggtgggatgtggctagggaggcacagggagcataacgtaggttctttctgtgattgttgttttgtatctttaactaccagttttttgtctacagcgtaaaaataaagtggctgggaacccttgccccatctgccgggatcacaagttgcatgttgactttagggtaagcagaatcttttatccagaactagggtttggatcctctctgcagtgctgaacagatcatcgggtgtatcacacactttcgtagccccaaacccgaacattccagtgacagccaatgtgagaacatccctctttccaggctttcaccctctactgtggattttattgcaagggtttagttctttctcttaaaactcaaagtcttaaattccaagagctggaccagggtaggcttttaatgccaggacttaggaggcagaggcaggtagatttgggaacattctgggctacattaagagacttgttttgcatgactctgtaatccaacactagcaaggctgaagaagcagaagtgtgagttccaagtttcgggccctgtcataatctactgcaccgttacagaagtgaaggggaagaaagctcacttctcctgggaaatgatgcccagaagttaagcagggtggtaggatgagacagagtctaagtatcccaggtggtcttggacttggtatgtggctaaacctctgatcctcctgttgtctaaggagggggagttacaggcatgtaatgatgccacacctagctcagaggttttattgttttgtttttgtttgggatttttgttgttgcttttagcaaaagatctcctgaaggaaaaacttccaatgacagagggaatctatctcttctttttttgtttgtttttgtttttcaagacagtttctctttgtagtcttggatgtcctggaactcactctgtaaaccaggctggctttgaactccagagatccacctgcctctgcctcccaggtgctaagattaaaggcatgcaccacccggctcattatcttttgaaagagggtctgtttatatagcccaagctgacctcaattcactgtcctgtctcagcaggcggagttctaggatttctaccttgttatttccttgtcctcccatacctggggctagagggcagatatgaagggagctgtagaatggaatagagttttttttcttcaaaaagccttcagaatggtaaggcttcgtcttagtaaatagtgtaaacaataaagatgctcacaggaaccaaaacaatggctgcacgtggaggatgctgggactccgagtgtcagtctgttggtggggggttcatgtccttccagcacatcacggaggatgcctgcccagtctctgcatgtaggcggttacaaaaagaaagcaatgactgggctgagcatggcggtaggtgcatctactttcttccccactcacctcctgtgagtggtttgtctgcttgtcttatgtaattaggactattaaattgctcttagttacacactgtattttatgcattatactcagcaggctattgtattacttactcatccatcatgttgtcatttatgggtaatttctaggaccttgatggctgtcccaaagggggccattttggaacatgcctcttggtaacttggtggcagactgtagcatgtatatgtgaaatgagttggtgaggctagaactgaaggaagcatccagatagacactgagcagtaaagacagccacgaggctgcccttgaactcactgatccacttttcctctgcctcctaagtgctgggattacacctgataaaatgtagcccaggctgccctcaaattcatgcttctgccttttcatggtgttccaccggggtgtgccaccacaacgggctatgtggctgtgtaaggtgtcaactcagctgtcagaggtcttgaccacctcctcagacattgtctatctctttcctgcagaatgtgaaactcttggaacagtttgtttgcgcccacacgggtatcatcttccacgccccctacacaggtaagcttatactgctatagttttttcttggaccactcctggtttatggtattggttggtagatgtttgtttgatagatcctatatatagcacataaatgtggttgaagcttttggagattgtatttaatgagggtactcattaggttaaaacagttaacatgtatacaaaagactaaggtgagcctctcaggagtcactgctggaggtagagccagggtgatcgtggtgagtttgaggtcagcctggtctatatagttccaagacagccagagctacacagagcgagcctgcctttaaaaacaaaaagaacataaaaagaacaagaaaaacaactaagttaacaattcgggcctgactctaccttaccctctggcctatggccatgtccagtttttcaacgtggcctctacagtagccaagccaagtatcataaatcatagacagagaaggaaagacctatagagcaagaataatgaactcgctgtccatgagaggtgcatggccccgtaataagttccttttgggaggaagttttttttgctatcaatctccagaatggagatgggataattactgctacttgtatcccattccctaacttgaaatcacttcttcccttatgggatctttctcggtggattgtccaagtcagcctttagtcacacttggcaactggcccatctgaggttttatcactccctggcatctctatggtggccagtcacccgaggtcctcatctagcttttaggcaggtgggagactggctgcacgggaggggggtggttgttaggtaaagccagctcctccacaatcagctgtctctgtacagaaacgttagccaattctgctctgtaggatgtgagttaatttttctctctgtaggagtctgtatgaagcagcacaagaagctgacccaggccatccagaaagccagggagtatggtaagtgacagcaaggtgacttggactggaaggaaggtggccagtgctcatagagtttcttgtaaattgggtgtggtgctggagcctgtagtccagttgcagattgctgggtgctagggctacgtgttaagacgctgtttcagtcacgaaggaagaaatgtttcttttctcacttgactctgtgtctccagagtcttgagtcttgtgttctttgttccgcccctctgtagtcttctgacagatgagagaaggggtaccttctccgtatatagtgactgaacacacagctttgcggggagagtccaggcagtaccctatgttctttgtttcctaggctggttgtacctaatgtttttaaattgggggggggggttccttttggtttttcgagacaaggtttttctgtggctttgggggctgtcccggaactagctcttgtagaccaggctggtctcaagctcacagagatcctcctgcctctgcactccagagtgcagggattaaaggcgtgggccgccgcctggctgtgcctgctgctgttgattggtccctctgtctatagtgccttcttgtctctgaatggaactgcccttcctcatcctccgttatttcctctaatcccataggtctcctcaggtactacgttccccagttcgagccccgagacactgacctcagtactgcccatggagctgtcagtgtcactccgccggcccccacgttgttgtcaggagaaccttggtacccatggtacagctggcagcaaccaccagagagagaactgtcccgccttcgccggctctatcaaggaaatctcctagaagaaagcggccccccacccgagtcgatgatgcccgagatgcccaccgctccaccagcagaaaccgccactgagcagatgggctcccagagtgcttaggacctgtgaactggggaagcagtcaggggttaagggaatggagtctaaggttctgaaacgggcctgttttggggacagtggcaggcagcccctaagggaatgactgaccgctgaggaggacggacatgaggttggggagaggtctggaggcacatgggaaactgaccgtggagaggggttcagatgtgaccgggagacttgactgtggtgtgtgcactggatccctgtcgcccagctttcctacaataaagccgtgtccgtccgcgtgtccctggcgtccttcggagtgactttccagaaggagggggtgaggtgtgtgagattggtgctgtggggagggtgctgagtctaactcaccctcctgccactccagcagggcaagggtgtgtgggggcgattccgtcctgtgggtcccctgggcgctgaaaaatgctgggttgccgtggcaccgcctaagcgttgctatgggaccgaaaagaacggggtctcccgctgcggaccctgccgtaggggcggggcgatggggccctttgcgcgcccctggtggcggaagtgacgtcgtgtggggcgtgtccggtcccgcacaatgggccatggagttcccgttcgatgtggacgcgctgttcccggagcggatcaccgtgctggaccagcacctgcggcctccggcccgccgacccggaaccacaacgccggcccggtgacatttcaaacccgccccgtggccctcctgtcccgtttcctcgccaagcccggccagggcaccacgcccccttctcgctggctgccggcccttctctctgcggctcacagcccggtgtctagtgacctctgaccctgggtctagccgggttaacgggcctgcatctccctgacctttcgccccctggcccaatgtgtgcggttgaccccccactgccccacaagtcacctcatgggagctgtgaaacccaagtttgggatctggaggggtgaggtggggggtgaggaagagatccgagcagaggcagaggagacccctggaggggcctgggtgggagtcgagcaggctgccaggacagacccctgggatgctgcgacccaggcgaggttctgacggcccgtctctctgcagcgtggacctgcagcagcaaatcatgaccattctagatgaactgggcaaggcctctgccaaggtacgggcacctccaggggaggaaaggctagccggggtggcaggtgggggcctgtacgaagcctgccctcatctccgcaggcccagcatctccccgcgcccatcaccagcgcttccaggatgcagagtaaccgccacgttgtttacatactgaaggacactgcagcccggccgtgagttctatgactgtcatccatgcgaatcacgccgttatccttagctgtcctccttccctttactatctctcccagacagttgctactgcctggctcattctttcccccatcccacagggcagggaaaggagccattattggtttcctcaaagtcggatacaagaagctctttgtactggtgagtgttgctgcaaactgggcattcgtaggcttcggtgccagagaagagatgtggaggaggataggggtgggtgggcagcaaagttgcctggctcctaaaaagatgtgttgttgttgacgtcacaggacgaccgtgaagcccacaacgaggtagaaccactgtgcatcctggacttttatatccacgagtcaatgcagcggcatggccacgggagagaactcttccagtatatgttacaggtgccagccggtcttcgagggttagccaaaagagatctaaaaggctcctcccctgaggctgccagagaccccgctgcctgcggcacggtggtcgttttcctcacatcccctcaccgggttcccaacttcatgctagcatgcttctctcactgccccctgcccacaagcctcccctttccctgcagaaagagcgagttgagccacaccaactggccattgatcgaccgtcaccaaagctgctgaagttcctcaacaagcactacaacctggagacgacagtcccacaggtgagaggctctgcacagaggctgcaccttatggcactaagcaatcctgtcagagtggctgacccttttgtgaatggtgggatacaagctagggccttgggcatgctagagctgtgctcggccactgaattacatactatgtatacagtcttctgcctgcatgcagatctcattcaaggcggttgtgagccaccatgtggttgctgggaagtgaactcaggacctccggaagaacagtcagtgctcttaaccgctgagccatctctccagcccgacatttatattcttactgtgcattccagttcatgtgtggagatgaaagacatgagaatcacttactcagggtcagcaagtgcctttacccctgaggcacgtggctggtcctaccttgagttgtttgttattgtcttagacttatttcattttatgtgcatgaatgttttccacatgtatatatgtgaccgtgttcatgcctgtaggcacagaggtcagaagaggtgccagaaccatgggcctggagttaagatggccgtgtgctggggactgggtcactctggctgtcctagcactcaccttgtacaccaggctggcctggaacatcgatagccacttgcttcacctttagagtgctgggattaaagggctgtccccaccacctcagctaatttattttttgagaacttcgtacataagttctgtatctacaaccctgctgcccctccaactcctcccatgcccccctccaaattatctctcctttgttattgttccatgtacatagatgtatatatttaaatctactgagtccctttagctttgcttatatctacatgtgtccaggatgtcacctctttttttgaaacagggtctcactggccttgaactcatggtgattctcctgtctccacctcctcgattatgggatgacaggtataccttgatgcccagctgtttggtttttgaaagagacttgctgtatagtgctccccctccccgcccacagccctgcccacctcaaactgatgatcctcctgcctcggcctcccaagacttaggattatgtcacaatgtccagtgtggtttatttttacagctaaatctttttcttcttacactatcacatgtactacaaatactcatcctgtcttttagttttgttttggtttttcgaggcagggtttctctgtggctttggaggctgtcgtggaactagctctgtagaccaggctggccttgaactcacagagatccgcctgcctctgctccaaagttctgggattaaaggtgtgcgccaccatgctcagctttcttgtttttgagagagtatcattgtctagtgttggctgacctagagctcacagaaatccacctacctctgcctccaccagagtcattcttggggcatttttgcttgtctgttttcagacaagatctcattctgtaactcagctgacctgagactcccagggtagcccaggattcacagtcattctcctgctccagactcctaactgctgtgttaccatgcccgcctttcatttgtattctttgtttaaacattatccattctctgtttatgtctatgtgtatgtgagtgccccggcatgagaaaataaattgagtgaccattgaggccagaggtattgactacttcacctggatgctctccaatagtagtaaggaatcttaacctctgagccacttcctattctgtttactttatcaggacttcttccttccttcctcccttcctgttgttggtttttttgagacagggtctctctgtgtagctttgactgtcctggagctatctatagaaatcaggctggctttgaaccataaagatcatcccacctctgcctcagcttgacaagggttgtttactgtactttattttcatccccaaacataagcagctcttttctacctgttctcacacagggggtttctcatttagtcaacagaataacagacaccccagccctcagggagcttggtttatcacggaggtgactctgagtttagagacacatgactagtgcatcaacagacatttactgtgtgtttgacactgtcttgggcactgggaccacttaaccaaccaaagaatctgccttctaaatgtggaaccagacaaacataaggtatcctaaggccaagcaaggtggtgcataagtgttctttactgtagttaagggtaagtgttgtgagaaagtgtgggtgtcggtgggggaggggctttacaggtgccaatgagacatcagaggaagccaattagttcatttgtgcagcatcgtgaagagagggtgtaatggccggtacagaggccgtgctcagtgtgaccaaaggaatgcagtagatgaaagccaaagccaaaggaagcgagcacacttatggccacacaggtcattgtaaataaaggctttggtttttacatagtgaaaagcaacaccacagccaggtggaggcgcacgcctttaatcccagcactcaggaggcagaggcaggtgtatctctgagttggaggccagcctggtctacagagtgagttccaggacagcctccaaagccacagagaaaccctgttttgaaaaaaagcacaatcactttggcggtaggtcttgtctccttggatttgcctgctgggccaaagaaacaggcagtagaagacccagggctgaggtcagggagttggatgggaaagcggagtccctgatgagagagagccagggctccactagggggcagcagtggatggggtggtgtgtctaaaacaagtgtgatctcgttacagatgggatgtgggaaaataaccattaaacccaaagcagtgggaggcatgacgctgcatgaaataataggtagattggctttggggaaatattaggagtcttctcttgaccggcttggtgctcactgtctggctctgaactcacagcaatcctgcctcagcctcctgaaggctaagattacaggtatgagtcaccatgcccagtgtaggagttgatttttaaggtggatgggagttgaaggtcatcactagtttggggtcatcctaggctacctgaaactcttgagtcaaaaaaaaaaaaaaaaaaaaaaggtaaaaggacagtatcagggtgtggtggtccacacctttaatctcagcactgctggagctgaggtaggtaggtaggtgtctgtaggttcaagatcagcctggtctacaaaatgaattccaggcctgagggggatgcagagtaagatcatctcaaataaaataaaatgaaataaaataaaagagcagtgcaaagggcacaaccttcacatcagaagcatcacacagtttgcaaggacaagtggagcagctagcttttaaggaataccagcagatgtcctgtaaaataattagtattagcaggtgtcctgtgatttctctgttcaagacttatatgcatgtgtgagtacccgcatgtatgtttgtgcgccacgtgcattcagtgtctgcagaggtgggaatagggcgctggagcccctggaatatagatggttgtgagccgcactgtggatgctgggcatgaaaggtacccagacgggcagtatctgcccagcctcttgatttgctctgcatctgtgctatgatagctctgcttctggagatccatttgtctaagcactgtttggtttggtttttcaagacaggttgctctgtggagccctagctatcctagaacttgctctgtagaccaggcaaactcacagagatcctcctgcttctgcctcctgagtgctgggattaaagctatgtgacaccactgcctacacagagttattattttacgagtatgaatattttgcctgcccaaatatatgtgcagtatgggtgtgcctagtacccatggtggaggtcagaaagggtgtaggatcccctgggactggagttagagatggttgtgagccacccttcgggtgctaggaaatcagtcttccccaagagctgcaagggctctgggctcttctttttctacctaacctctattactgtgactctcttctctccccttttcttctctttctcgtctcacgtagcccaggttggcctccagctctctgtagctaaagataacctttcccttcccgagtgcttgcatgacaggcatgtggcactgtgcgtacccagtgtatgtggggctggggctttgctcagggctttgtgggctggcaggtaagcactccactagctgagctgcaccaaagcccacccctgtggccttgctggcacggttcctgtgcccactgtgtgctgagattgaggggacgacacgccttgttttgctttatcttccaggtgaacaactttgtgatctttgaaggcttcttcgcccatcagcatcgtaagttcctgagcctctcgtagatctagtagctggggaaagggaaaggaaagaggtgggctcctggtcccactggcccccactgagggccaccgcctcttcctccctcacagggccccccactccctctctgagggcatctcgacactctcgtgccgctgaggtcgaccccacacctggtaaagcctgcatggactgggtggagttaaaggacagtgaggtctagtttctcaaggggtcccaaagtgagcagtgctgtctgctgggcactctggatactctaaagccacccacagagccagcagtcagttccctctgtttgccttggccctgctgggagctggtgcattttataactgctaatgctgaagtgtgcctctaaccacactgctccactgcctgcggagatgcaccctgcccctgttctcagcagaggttctcattaagcaagccccttcagagctttgctgatcactgatgtcaacatagcctctttactaggtcagctcgctctaaataggccaaaatcaaataaatcacttcataaactccataggctctgtcagccagggaggcacaggcaagtgagcccagcagtcctttgatttctgttcatggtgtagtgatgtgaccagtccacagtttaaatatttgctttagaagagactgctccactcaggagtcagaggcaggcgatctctgtgagttcgagaccaccctggtctacaagagctagttccaggacagcctccaaaaccacagagaaaccctgacttgaaaaaccagaagagagagagagagagagagagagagagagagagagagagagcgagctcaaaattgatggaattttaacatggcatggagacacacgccttttcccagcattcagggagccaaagcaggtagagctatgtgagtttgaagctggcctagtctatgtggtaagctctaggccagccagagcaacatatgagatcttgccttaaaagaaaaacccttttcaaaaataattaaacctggctgggtatggtggcgcacgtctttaatcgcagcactcaggagacagaagcaggtggatctgtttgagtttgaggccagccgggctacacagagacaccctgtctcaaaacaaaaacaaaaccaaaaaaaccaaaataaataaatagacccatttggagtaaagctcacaagctgcctcccctgctccctccccctggacatcctcagggagagggtacagccttcatcagtggtgtggtgctgctggcacggaatggccttcttcctaggatagccctttggcctagaaaaggagtaacagtggcccaaagaacagcttattgctctctattagtgtcagcccaggctcccagaggcccatcatgtccatgaggcgctgtggttcctgaggccaccgtccagcaggcagtgaggtcacactaccatcagggaggatgcagatccacagagggctgctgggatctccacccttttgatgtagaacctgacccacccttgccatacagtaattcccacctgctgaagcccctctgcaaacatttttttctcttctttttggggagggaggggttaaggcaggatctgtgtagttgtgactgtcttggaactaactatacagacaagggtggccttgaactcacaaagatcagccggcctctgcctcttgagtgctgggattaaaggggtgagccgctgccaccattcggctgactccttgttctttgtagctctggctgtcctggaacacaccatgtctgtcaggcctgcctctgcctttccagtgcagggacatgcctttagtgtgtgtcaacacattcttttattattactttaaaacctagtaaggcctcagtctctccatatcttttttgaacaggcaggagaggttctgcacctcctctcccctccccagaacaattcccaattaaccaagggctttgtccatctcatctagagggacccagggtcctcactggcccagctgggactattccactgccccagaaccccaggggggcctgacaacacccatggacagtaagagctcgccttcctttggccatcctttcctgtatttcccaggccctggtctcccctggatctttctcctgaaactcttgtgtttggcctactccttctggctctcccggaaagtgctccagcattcttcccccaaactccctttggtgtgctggctttggcacagctcagcttctgtactggcattcccaggaggagctgtggtgtcagggagcagaagtttggcattgtggggaagtagcagggaggttgggtggaaagtgcatctcctaaaactgaacttgtgtccctactaccaccagctccagcacggaagctgccaccaaaaagggcagagggagacattaagccatactcctccagtgacagagaatgtaagggggttggggaggggggctggggggcggctttgtgacatatcgatttctcaccaattgaccctaatctttgctcttcgctctgtggaaggcaccatctcttaagtgcatttaactacctgacccaataactccagcttctaggtccttaatctttgtcttcttgcttgcaaattataattaataatcttattaatggaggaaataattctctccaaaaaagcagatctgcttagtagaaactccagacagaagggatttctttctgattaacaggtggatgacaaggggagggtggctgggtctgaggactcagaagagggtggccatgcctggatggagaaccagatcaggggaggctggctagacttaaggacccagagaggagtggctaagggaaggtaactaggagacaataataaatggctaaagctgctttttctacctaacctctattactgtgactctcttctctccccttttcttctctttctcaccctctttgtcctcctccctcaagtcctgaaggtggctgtggagcctccttggcctctgaacagggcccctcgccgcgccatgcctgcagcccacccacctccacgctccagcagcctggggaactcgccggatcggggtcccctccggccctttgtgccagagcaggagttgcttcgctccctgcgtctctgcccgccacaccctactgcccgccttctgctggcctctgaccctgggggcagcccagcccagcgcagacgcaccaggtaatagggcccgcaagtctgggagcctcgggatgtctagaagttaggaaggtgaaggatgaggtgaatcccccagaaatgtgaaacaataaacttctgtagcactggtctggaaaaagagggaagtatctagaggttttatatggagccagggaccagagttgtgttctgagggtcatcaaaagagtaggaagactggatccatcgggtgggggccttgagcctttcacaactgggggattcttggttttagcatttgccagggatatgcatgtgtctcacaggctgggaacaagtgggttgctctggcaagggcctgtgtgccaagagcccgtccagagaggcagggagtgggtgtgtccttatgtctcctcttagcttcttcttcacctctgacatctccgtttttctctctccctgcctcccctctcccatcctcctgtccataacatccccccacagctcccttccccgctctgatgagagtcgatactgacagcctcctcccctcccccttcctaaaacctgcaacccactcttccatcgagattttttctccccctttcttgaacagctgggttgccagggttctaaatagcctaacgtttgtagcttttcttaaccacagaagacaccccacactcccaacatgtgttccaagtactctccatagacagcccattctgttcccagaacgctcgggctaaatggctcctactgactcccctagagaggcactctgcttgtggtcagactccagaccatcagagcaagtccaagagcatcctctgccagggagagtgtcctgtcgatggataattccctccacagtgcccacttgcagctcggatcctgccgccacacaaacctgtcatcagtctgctgatgccagactgtgagcaagctgtgcctcagagcagcagtccaggctgacaagacaaggactccttggcttcccagcagggtcctcccaacattgccaaactcttactttccaagcgacaggtagatagatgtgtcaaatgttgctctggggtctctacaggagttctacagacaccaccactttcctcagctaacccaagtctttctcttggcggcagaccccagcaaaggtcccagggctgcttgcttagcggtgtccctgaagataagcctggttcactctaacctccctgcctccctaggaatagacttttgaggttgtgttgaaatgacatgaggatcaccctcctgctgccctccctccttctccatagcaggaaccccctcccctgcttccatgccttccggggtgtagacagaacctcccccccccactctgaacatgtgatggtagatcaggtgccccactctgtgttccctcaagtccttgggagcaggacctccctctccccacttaatccttccttctgcccttcagtgctgtctcaataaagtgtggactcttctgttttctaaattgacattttcaacgaaaaccagcccaaggtgcccagtgtcttttgtgcttctctcagggctcagtgcctcctctctcctctgcagatctgaggtctgcagagctcatcctcgcctcccccccatgcccctccttttgaggatctgcccttccccctctattgctggttctatcctagagttgcagtagctctgtgtagacctctctatgcctgtgggaaccttagcccacaccacccacccccacccccggtgatatctacctctttcccctggccagcccttgataaattgttaagattggctggatcttgggactcactaacctcagggctgtttctggattcctttcctactctttgaattcctcatgtctgcccttagtgctctctcaagacaagtcctacctactatctgaccccatagcgtactgggcatggtggcacacacctttaaccccagctcctgagaggcagaggcaggcagatctccattagagtgtgaggccagcctggtctatgtagcaagttatatagtccacccaaggctacatagtagaaccctgtctcagtaataatagtaagtaatattaataatagtacaacagtctgtcaccctcgaaaagacagccttttcctcctaaatttgaccttgctactctggtctgagatttcttatatttaaggtaaccagtttttcaaacatcagggcacatggtcccacaagctcctttttgtttttgtgtgcccccccccatgcatgagtgtttttatgacataatcggatcatatcacataccacacaaccccgggaaagtaacacagcagggatatgtcagatcttgacgcacaaaataagacctcccctacctttgctgggaaaaaggctcagacaggaaccctctgggtggcagctgcccttcgccttgtccccatgctattatccttccctcgtctctctgacccctccctgccatctgtcatcctgaaccacttccccaccatctcccgtttcttctacaggggggctccccgggggctggtagcccaaagctgccactacagccgccacgggggactcagtacctcatccctgggtagaggtaagtggtcagcctttcttactctccaaccaagtgggccacgcacaccccgccacggtctcccagatgcctggtatttccgcaggcaatcaagaacggaagcagggggagcaggaagcagaggataggtgaggtccacacctccccctaacagctgctgcccgcggcgcctctgactctgcctaaccctgctctcccccgctttctgtgacctgggtacctttctacctcacagcgcataagccttgctcttccttgtgggttgagctctggtgcttgcgtttggacacagtgtgaactgccccagccttctaacccagcaggtgttgtccaccacgttcaggcttgacacccgcgacctctaacagtgactaccagtgactaccgttagctctaacaccctccctctccctctccctctccctgccaccaggtcgtccagtgaggatcagaccttgttacaggatgggtctggggaggaacctgcgcactcagttgctccaagggtccaggttccggcagctgtgggtggggacgtaatgaacgccaggttcattcggaacctgcaggagcgccgcaacaccaggccctggtgatcgcagcccctcccttcacaactggacacagccaaagccgggcacttcataatggatgcattcattcattcattcattcattcattcagcagacctgaccgcttcagatcgtttgtatcgtatttttaaccagagcaataaaagtatttattttttaatcactatagccgcggaacaaagtggcccgtcattccctcggtccacccaccccgcgtcctcacgaccgctttccagctcgctctaccttcgcccggtccgggtttcgctaggccggccgagggctcagagcaagtccaagagcatcctctgccagggagagtgtcctgtcgatggataattccctccacagtgcccacttgcagctcggatcctgccgccacacaaacctgtcatcagtctgctgatgccagactgtgagcaagctgtgcctcagagcagcagtccaggctctggcaggcaccaaggtacccccgcccctggggctccttggcagcccagggacttggactcggtcctgacccaggatggcctagcgtcctggcagcgacagcggttagtgaccggaggagtgcacgctccggcagtcagcaaggattatgtcatccagcggggccccaaatgataacagtttgcgtttccgtactacgtacgcaatggatggtgaggtttagagcacatacacgatcctgtacagccctcataataagtctctcaaggtctcaccgtcctccacgcacaggaagggtgtcggtgggggaggggctttacaggtgccaatgagacatcagaggaagccaattagttcatttgtgcagcatcgtgaagagagggtgtaatggccggtacagaggccgtgctcagtgtgaccaaaggcagtaaaccggctcttcattcgttcaaacaatgtatttttaaagtttgtttgttttatgtgcattggtgttttgccgttggtgtcaggtcccctggaactggagttacagacagttatgagttgctgtgagggtgctgggaattgaaccccggtcctctggaagagcaatcagtgctcttaactgccgagccatcgctgtagcccccataaaatacatgcttagaattcttggtctcagagatgcaaaactggctcccaatagtgaggggattgattgtccttttcctagagttggggagggtggcactggcactgttgtgctctatggtcctgtcttcatcagagacagaaggagcccattcctcttccctctggcagttttcccttctagaagccagaggagcaggtggggtttgcagcttgctaacagcccagcttggatgagactttaccgtgtctttttttgtttttgaaactaggtgtcactgtgtagtcctggctggcctggaactcccgggccgtcctgtgtctctctccctaagtcaccattcctggcttagacatctgattttgtttttggtttctgttctctttctctaggaccagctttctcctcgggctctaccattcccacccctctgttcccactccactccagcttctccaccttttcctcttccctggtcactcacacccccacatcctgccacccaccctcttcctcaggctctaccaccacctctgtttcaggtccaggctgtcaactcattgtgggtggttctccctctgggaaagggggaggagggaccgggacctgagttgcacaatggctgtctggatgggcttaggagcctttttgagggacccccttgcccccatcctggggcttggatacctttccaagctcctggatctcctcgaccttcccccgataccccatcaagagatcagagcatggaggaacacctggcggtcatgcatgagaaactaagacaagaggtaagcggctcatcggtaacgggaaccgctatggagacaagtcagtcagctgaattcctggcaacacaaggcagtcatatataactgtgccgtgaaatatcttctggggaaatggctggccctctgtttgagtggaggacagctaagttggagttgacctttttgggtgggagtgggtgttagtcgaccctaacaatagataactgagaaatacgtaaactggtgaaaggcctgtaatacagtcagtcaggaggttgagggaagaggactccgaggtcaagccagattgggcaacacaccttgcctcaaaattaaattttatatatatatatatattgaaatgggacctgttctctcccgctgagttgatcccgtcttcttctccccagttgcctaccctctttcttcgctcccatgactacactctgtactcaatggatgtggagttcatcaatgagatcctgagcattcgtaccaagtgagagttggggcaagggcgggagaagaggatccaatgctaaacaccccagccttgtctcagagaagccttgtcaaagagccttgtctcactctctaactaggcggcttgagagtgactcttccccactccttggacagaagccagattgggtttctagttcagcgatcctgatacccctgtccctttgattctcacaggggccggacatggtacgttatgtccctgaccctttgccgcttcctggtttggaactattttgcacagtttcggctggagattctacagctgacccgccaccctgagaactggaccctgcaagcccgctggcgtctagtaggcctgcccatacacatgttcttcatgcgtttctacaggcgtgataaagaggatctttaccggtaagagggccccgaaccgcagtggcttcactaatactgtcttggaagttggtgatcttgtcttgatttggctgtggatttcctgagggtagaaactttattttatcttttgttgttgttgttgttgttgttgttgtttgagacaggatttctcagtggctttggaggctgtcctggaactaagtcttgtagatcaggctggtctcgaactcacagagatctgcctggctctgccacccgagtgctgggactaaaggcgtgcaccaccaccaccggttttttgttttgtattgttttgtttttttatttaaaacgaactatttttgtgtttatgtgtatgtggtaagtgaaggttcagaagacagtttgtgagaatcggttctctcgttctaccatgtaggtcctgggacttgaactcaggtccttgcctgcaagcacctgtacttcctcaaccatctcaatggcccagtctacttttaataaaattaacagatttttgtgtctactaagaaaccccagccaggtggtggtgacggcacatgcctttaaccccagcacttgggaggtagagacaagcagatctctgtgagtttgaggccagcttggtctccagagcgagttccaggacagccagccagagttacacagagaaactctgcctctgaagaataaaaagaaacccctgaatttcagtttcttcctatgctacttggacctcacaaggtatttggataagtacttgtttattgaacaaagtattcctgcttcctggaggatcaggagtcaaagccttaactgtatgaaaccatctcaaaaaccaaacaaacaaaactactgcatcctaaatttagtttcacagcccttggtgaagtgcatggttaagtttctagctggtacatcaccccaaattactaggctcagcctctaccattgtacttaagcttttaaatgagtgattctgggccggtgagaagatgcggtcggtgtgtaagagaaggcgcttgcctccaagcctgacaacctcggctcagtacccggtacccaactaatgggaggaggagagatcgtcttctgcctggggcgcgtgcacttaccccacacagtcaaacaactcgtgtttcaccagctttgctgcacagtaggataacctaaggtcttctatagcgtggtactcggatctaattgctctgaatccaacctgagcgtgaagttttaagttcatagatgcttgggcacagtggagagtgactgtgatagtcccagtgttcaagccgagagctggaagtcagtctgggctacatttctgagggcctgtcttcagaacagttcaccaggtgaatctgacacgtggcaaactttaggaactggttttaacaaatacttgaattacaccttagcttctcccttctccaggacctttgatgcctattccaccttctacctgaattccagtggcctcatttgtcgccatcacctagacaaggtgagtgtcgggactgggtggggtagggtgaagggcagagcatgtctgtgttcctccccagcctccattaacctgtctctgcagctgacaccctcacactcgccgtcaacgcctgtcaaaaagctgctagtgggagccctggtggccctggggctgtcagaaccagagcccaacttacacacgtgttccaaggcctgacccagacttgggtcaaggcatcactgaagactttgctacgcacaagaggaggtgaaggtggacaagaatgtcgagggccagccacctccctccatgctctctctttcccatctcatgctgtgtaaagctgctgtgtaatttaatttgtaaataataaagtttaagcaacgatgaggtagagtttcatgtcactttttcagggcctcaaagttgccacacacttaattccaaaaataattttatttactaaatattaaataaagtatggaaggaaaaggaagctgtgtggtccagtccgtttgtcatccactagcccagctcttctcgtgtcttgcctacttttttgggcattttcttagcatggggatcttctagttccttggccttatagtagtggggggccacttccaagagccagctgctctcaatctccaggacctgtaagaggacagaggtcagtagggctccttcacttccaagccagggttttcactgtgtggttaggaaaggcttcccttcccctttgagggcaagaaggcacctggctatgtttcatgctggccgggcagacacaccctgacctgctcaagacatcaggtaggtgagccccgagaagagcctgttctgttcctcagggcagacttcatctgcttcgtttgcctctgtggccccagcacgtggcacacactttattgatgctggatatgaaccaagcgaggctctcgctcgctacagaagactcaccgaggtctcagcacgacctctactttttccacatttataaaacgttttatgtgtatgggtgctttgcctacacatatgtttgtatattacatgcatacctgatgcccaagaaggccagaagaagccgggcgttggtggcccacgcctttaattccagcactcgggaggcagaggcagatggatctctgtgagttggagaccagcctggtctacaagagctagttccaggacagcctccaatgccacnnnnnnnnnnnnnnnnnnnnnnngaaggccagaagagggtgtcagatcccctggagttaagaggcagctgttagccaacaggagggtaccaggaaattgcacttaggtcttctggaagagcagtcagtgagccatctttccagctctgtttattactgtgtgtgtgtgtgtgtgtgtgtacactcgagcacgcacactcaagtacagtgcctgcagaggctagaagagggtgatgtgatcaatgattcccccaatctggagtgtattgtgagctgcttgctgtgtgggtgctgggaactgaacccaggtcccctgcaagaacagtgagtgctctagaccactgagccaactctccagccccactgttacctaggcagatcttcaacgtgttgtcgtcctgcctcaccttgagcaccagggactacagacctgtgccatcaggcacagcttcaattatctattgaatgagttacaattctcagatctcggaaggcactaacagttgcaggaaaggaattttttttttaagatttatttatcatgtatataacattctgcccccatgtatgcctgcacaccagaagagggcaccagatctcattatagatggttgtgagccaccatgtggttgccgggaattgaactcaggacctctggaagagcagtcagtgctcttaacctctgagccatctctccagccctgatttattattttttttttaatttatgtgtaccacgagctacatcccaagcatacattaagtctgatgacatgtgaccctatgttaaactaatagacctttttgtttcggtgacagtcccagaaatacaaattgagtttaagatgccagcatactgtctccccagtctccacccatctaagcaagcaacaatcccttacctgtctcatgaactcctttgtggtcaagacaagctcatggtaaagcaaccagcgtggctgttgttcaaagagagaggagttgggatgaataaacactgtctgctgctgcttcactgtgcggtagccactccgagtcagcctcgcggtgtggtaaaaataacccgaagtgatggcctaagatgcaggcaagaaaataaggttaggcgccatttgggggggtcttccacttcccacctctgagctcaggtttctggagaaccagaaaggtgaggaatcccagaagaacccactgactgacatgtgctgtccagggaggaatgggctccggtaagcaccagggaggagagctcaggcagggaaagtgtggtgtgcccctcagaagtggatatgtgtctgaggagagaagtgtgctgggtaacagtttcctctgagatggaaacatactgccctgcagtgaagctcttcaaacaacacaaagcagctctaggaggtcccaaaacctgaccagattcactaggcccctttccaccagagtaatcaataaacgccgtgtccctcagacacactaaggtgcaaagaagactctggaggcctgaccagctgcttggaagaaacaaaccaacagagctaccaaaagggttagaccaacagagccgcttgtaaagggtgttttccaacctgctgagctgcctgctggctgtgaagtgagctctagtttcccagcttttgtgagctgtcacccatagtgggttgggctttggtgacgcagctgtctgagtcatttcagctcctgtaagtaacaccgtaatccctcgctcatattcctacgagtaacccaaataaaactcactggttggccaagttaaactgttgtgggctccctgtctgtggtaagagacatgtgtagcatctgcccagaaaaagttttataacatagtgactcctgcgttgtccgctgacttacacacacactcataaacatacatgaaagaaagcaacaagatgccagtggtggcgcacacctttaattctggcacttgggaggaaggggcaggcggatctcttgagttcgaggtctatagagtgggttctagtatacccagggctacacagagaaaccctatcctgtaaaaaatgaaaagaaaaagacaaaacattaacaacaaaaaccctgaccttgcgcacacgaatgtagtctccttggcaggacgtcaagccaacttccacgcgctccaggagcccctccagctgttcccgcacatcccgggctcggcgcatggatctgaactgtacaaagttctcatagcaccactgagaagagtagccactctccgcccactgtgaagatgacgggtgtttagtacctatcaggacagacgtatcccacacttcccaaattcccacttgcccagtgacctgtgtgtacacattgagcagaaccaggtggtccccaccagggaggaagaagttgacacgggcgttgtcggcatggaccaccttgtccttgggccggtagaagatggagttgttgacagacagcatagcagccactgtcaggatctcttctgaacagctgtacctggtgtagggcagcaagagatgaggtcaaagcaagacaccaaagaacaaacgaggacagactctctgacctctctcttcctcttcttctttatttatttgcttatttattaatttattgtcttttttttttttttcaagacagcatttctctatgtaactgccctagcacttgatctgtagaccaggctggtcttgcattcacagagatcccacctgtctctgcctcccaagcaccaggattaaaagatatgccccgccactgcctgctgagatttctgatctcagacacagcaaaggaacatgtttttttgttgttgttgttaaagatttcttttatatgtataaaatgttttgcctgcatgtatgtgtgtgtgtcatatgcccgtggaagtcagaagaactgaagttaaagatggttatgagccaacacatgggtcttgggaattgaactcaggtcctctgcaagagcagctgatacatttaaccactgacattttttatggatggtcccatacagacctatctaaacaccctgtcctgaagccttggggttaatcaagttccagcagcccacacacacccatcacacaggaacgttgactcagggtcccagattttattttattaatctgtttgtgctatgaggcagggtctcattatgcagctctcactggcctgggactctaggtataccggctggccttgaactcagagaatccacctgcttctgcctctgctacaattactggccctgggtggtagctgtactaaccacttgtgcccacagactatcacaatcgagggcaggaccgtgactcacagaccgtctggggcctctaaaggggtgatgagccttcttaaataaagaccacgatggaaaaagaagacggaggggacacttgggactgaggaggcatggccacttggcgccagaagccgggcgggcgggtggacagacagacagacttacttctcagaggccaagatcatcttagacagcatgggatccacaggcagctccgccatctttcgaccagacttgaaagaaagaaagggaaaggtgaggcccgtcttccctcaggttccttccaccattacaggagcccttcatcctgtcccaggccatgctgtcctctcaccgtggtaagttcccccaggtggttgagggctcccagtgcataaagctgttccaaagccaacagcagggtctcgtagggtggagggtccaggaagtcaaagtgcatcaggtcgtggatccctggggaaaggagcgaaggattgagagagggccctaggcaagcaccagagcccgtcaggaggacgcgggctgccctgtcacctaggctcttcagcagcagcaccacattgcccaggcttgtcctctggatctcgggaaccgtggtctcctcgagctcgtgctgataggcccaggctgtgtacaggcggaagcacttccccgcggcgacccggcctgcacggccagcccgctgattggcagaggcctgaaaaggaaggagaggcagacacatggctagggcggtgttgactcaagagcctggagtatgtagaccactgatccctggtcctcaaatgctacttatggatcaaacattctctggaggaaccaatctgtctccctcgacctcacggagatgtgggctgaccttgctgcagggtgtgacggtgagagactccatgcccgtgcggggattgtagctcttctgcttgcagaaccctgggtccagcacgtaaatgatgccttcgatggtgagcgacgtttctgcgatgtttgttgccacaaccacctaagtgagaagacagcgtcgtcacccagggacccagcccacccgggcagcccaagaaagttcagtgcagtgaggaacagggcaaagggaggtcaggagacgaggtgagacctgcggcagggtgatggggcgtaacaaagaaatgagaccggatgtggggtttcccttcagagatggaagatggggatatctaggaccctgccctcccctccccaccaccatccgtacctgtctccacaaaccccctgcctctaaacctgcttctatcacccagcattcaggacggcccttttaaagtacttaaacctgtcaattcccacccagatccaaccacagaatcaacctacaccccttacagcctggactacttcacctgcggctgcctctctgatcacaccgatcatccacgtgctcaaaccccatgactcctgcatgcacaccctgctatccggtgctctgcaccggccctcccctcagcagggcagtcctcccagacagcgggctgggtccccctcctctttcctctactctaccctggcctttagagagcagcctcctgcccttcctcgtcctcagctccagtctgcttccatgttcccaggctatcctgaatctcttcactgcacccgacacaagctgacacggtttacacgcccactgtctcctcccgtcatactggaagtcttactttacccatcagtgtacccctcacctcaggcccccgccccagacagcgtgggctgggcctccacgctgggacctcacacatgctaggcaaatgttttaccacagagccacatctccaagccttcaataaataattgctcagtgaaggtcatgactctacttaaaattgtttggttcttaaaatctgagtgcatctggacaggggtggcgcatgcctttaatctcagcactcgaaggtggatataagttcaaagtcagcctggtctacagagtgagttccaggcagtcaggactacacagagaaaccctgtcttgaaaaaccaagatacatagaaataaatagatgatatggatgatagataggtagaaatagatacatagagataaatagatgcccatgtctgttcagctttggcttctgctgcaccacttgaaatccccaaacccactcctctcagacttcaaacatgcattgacttccctctgggactccccagacgtttccccaaaggttcactcaaatcctatgtcctggcaaacaaagctttccttggcctccggaacttgaagcttgctaactctcagctaatactgatttcatctctctcagcggaaggtgagagcctggctgctccctggctatgtccaatagcttggcaaacagctcgcagggacagcacgtgcttgcttcaacactcactgtgtgtgccacagggggaagagtaaaggcttgcctctcccactgaccttgcgggccccagggggtgtgggctggaagattcgggcctgcatgtctgagggcaggttggcataaatgggcagcaccaggagctcccggattttggaacccagacggcggcaacggtcctggagcatctcacaggcggcctcaatctcctcctgaatgtaggcagagcagggggtaggagtcacagaatccacacaccaggccatccttccccacttcccgccacagttcacacctgtccggtcaggaacaccagtatatccccagggggctgagtcacgtggatctgcagcacagacaccacacaggcttccaggtagtcggcctctggggcctgtggaggaggaggattcggggtcacagagggccaccagctcaagctcttctccatgctcagtgtatcttttacccacccaccccccccaacctgggtgtcccatgagatccttcccttggacagcctcctaaaccggccctacgcctctgcctcacaatgaagcccatcctcccaaggggcaccttggtatagaagatgtcaactggaaacctgcgtccagggattcggaagacgggggcgtcatcgaagaaggtggaaaaccgggcagtgtccagcgtggctgaagctaccaggaccttgagctcgggtcggaatcgagcaacatccttaattaacccgaagagaatgtctgtgtgcagggtccgttcatgagcttcatccaccatcaccacgctgtgggaggcaatgggacaggggtgagggggaagggacaggacagtgcgggattggctagcaggtagctggatgaaagggagggcgggtggagggactgggtaaggggaagtcaagcattgcggccaagaaaagcagtcaagatggcgttggtaaaatgttcaacagtaaaggcgctggccaccaagcctgaggacctgagtctgacccctggaacctacatggtgaaaggatagaactgattcctgcaagctgcctcctgagcccctacatggcacacacacacacacacacacacacacacacacacacacacacannnnnnnnnnnnnnnnnnnnnnnnnnnnnnnnnnnnnnnnnnnnnnnnnnnnnnnnnnnnnnnnnnnnnnnnnnnnnnnnnnnnnnnnnnnnnnnnnnnnnnnnnnnnnnnnnnnnnnnnnnnnnnnnnnnnnnnnnnnnnnnnnnnnnnnnnnnnnnnnnnnnnnnnnnnnnnnnnnnnnnnnnnnnnnnnnnnnnnnnnnnnnnnnnnnnnnnnnatacacacacacatacatatacacacacactcacatatacacacatatatacacatactcacatgcatacatatacacatacatacacacatacatatatacacacacatcgatacacacatatacatacataaatacgcacacacacacactcacatatacacacatactcacatgcatacatatacacatacatatatacacacacatcgatacacacatatacatacataaatacacacacacacacactcacatacatacacacatatacacacatgcatacatatatacacatacatgcatacatacaccgatacacacatatacatacataaatacacacacacacacacacacacacacacacacatatacacacatgcatacatatatacacatacatgcatacatacacacatacatatatacacacacatccatacacatatacattcataaatacacacacacacacacactcacatacatacacacatatacacgcatgcatacatatatacacatacatgcatacatacacacatacatatatacacacacatccatacacatatacattcataaatacacacacacatacatatacacacacactcacatatacacacatatatacacatactcacatgcatacatatacacatacatacacacatacatatatacacacacatacatacacacatatacattcataaatacacacacacacacacactcacatacatacacacatatacacacatgcatacatatatacacatacatgcatacatacacacatacatatatacacacacatcgatacacacatatacatacataaatacgcacacacacacactcacatatacacacatacatatacacatacatacacacatacatatatacacacacaggcatacacacacacacaggcatacacacacacacatacacacacatacatacacacatacacacacatacacatacacacacacacacatacacacacacacatacacacacatacatacacacatacacacacatacacacacatacatacacacatacacacatacacacacacacacttttttttttttcaaatgtaaaaaagccaacagggcagggaagtccggcagccaggacaggaacacgttgtcagtatctctgggtcagtcagaacagctattctcaccagaagaagcggaagttcgagcacgccttaaaggaaacaccgcttggccaggtggctgttgctgagacccacaagactgaggccagctcatgttacatagtgagtcccaggcctgcctgggctgtagaatgaaaccgtgtctcaaaacactaaagagatctggtgggttgagtatgtcggccgtgggaagaacgagattgaaggaaacaagagtctctgaggggcataggcagcaggagagaggtggtggtagagaacggttcgctctgatgtgcagtcctcaaagcggatgctgtagccaacctggccagagacaggtaggaggtaagattgaccagcgcccagacctgagatgtgggaccgtgaaagaggcttccctctcctgaatccccaaagaacttacctcattcccaagcttcacacccatctcccgggccactctggcagccacgctcatggccgccactcttcggggctgggtacaagcaatcttcatacccttctttgtgtagccctagaaagagaggagagagaggtgttcctctgccaggcatcctggggcgagccaggcagggcaggaaaagagaacggaaaagaacagactgagattagaaacgagggcccccaggggacgccgggccagccctgcagacctgcgcttacagtcagggctctgccagacttgaactgaccagggacagactggctggggcaacagccagaagccaggggagacgggaggtcagagagtaaggaaaacaagcgttttcattcttggttctctcgcccctgaaaggggaaggcagggtagaggtcacacggggctgaagcatgtcaggttcagattcatgctcttcatctctcgctgcttgcagggcagacccgtacgtcctcactcacacccggcacggtgtgacagcatcgagaacagaacggcagggaacctgatctgactgtgtctgaaaagcctcgggacttgcgcgacggacaggacaggccaggccaggccaggccagaccagggcaagacaggacaggacaggacaggccagaccaggccaggccaggccaggccaggccagaccaggacaggacaggacaggacaggacagggcaagacaggccaggacaggactcttgcaacccctccacacacacgggtctgccaaggctgactcaaggtccgggccgcagcgggcacggtgtgatggctgacctcctcgaagaggtactgcgggatctgtgtggtcttcccggagccggtctcgccttcgatgatgaggacttggtggctggcgatggcggccaggagctcctctcggaaggggaacacgggcaggctgcggcggacagcctggatggactccttctgctgggcctgggctgatgggggtggaactgacgacggctcctgaggaggaggaggaggaggaaggggatggagaatggggcccctgcccttttcagagtgtccgtccgtcccgtcccgtccccccccacagacgtcccagactcttgctggcacacacctcgtctccctgcagctgagcggctcggacgaactcgatggtctcgtcctcctccagcaccagctggtacttgggctcctgggcggcggcgtccctggccccgaacttgagggatgcagcacctagccgggcctcctcccagcgccgctgctcctctcctggggcgcccgattcctcctccacgacgtccacagctcgagctggctgcggagagaggcaaggctgcggggcctggcgaagggtggtcctagctgtcccctcgctccctccgcctgctgtgccccacccgtgagcagggggaggcggcgcccctcacctgtccccgagtctccttgggcatatggtaccggttggtggcctccagcttctcctgctcgccggccgcccggtactcccgggccaggtcccgcactcgacgcttgtacttgagctccctgcgctcgtgccggctcagctccacgtccccaaacaggacctcctcatccgccagctctgcctccaggtcctccagcttctcccgctcgcgctttgccaggtactcgcggcgagacttcttgcgaagctcggggacctgggccaggaaggacagtcacaacctcaccctaccagggaagcaacacagttccccactcgagagatgctggctgcctacgggacagcagaagccgagctgtgactcgaccccccggagtcaggagggtttgtaacttttcctggtggttcctgtcagtcagcccccccctgcgctacggactgagcaaccaccccacagtcaccacactctctccccagcccttcccgccatggccaaccgctccatcaatctttcttttgtcgacatttattatgtatgcagtgttctgcctgcatgtgtccctgcaggccagaaagagggcaccagatctcattacaggtggttgtgagccaccttgttttggtgggaattgaactcaggccctctggaggaccagcttgatctctaagccatctctctccagccctggatcttgcttcttgaacccggggtctcaccatggctttccggtcttcctcagccatcttgaggcgtttctgagcctcttcataagcctgggtagaagaaatcaggtaaatagggtcatgaggcccaaaagatatgcacatctacgaccattcccctcagaatgacaaatgtccttcactgccccttctcagtgaagagcctctgtgatttccaccaagcagtgaggcccttaaccagaaagctcacaggaccctgtttccccacacaggaaccctagcgacaacccttgtcttcccagcgacacctctgcaaccaaatccagatgtacctagcaatgttcttcacctttttttttttttttttaagattttatttgttatgtatacagccttctgcctgcaggccagcagagggcaccagatctcactcaaggtggtttgagccaccttgtggttgctgggaattgaactcaggacctctggaggaccagtcagtgctcttaacctctgagccatctctccagccctgttcttcaccttcttatctgatcgctccaggacattccgggtccggtccttgtccctctgccgcacccgctctgcaaacgcatcccgttcctccaagtcctgaagacgctcgcgctctgtccgctcccactcatcctctgaggccggcttctcctccgtgggtgacttactgtccctgaacccagcccagcgcatcatcaaagaggggtatcgagaaagcgtatcatccccacggccaaccacctgccccggctccctctctcctcggttctgacttaccccgtcttcctcttccctgcctcagaaacctcttcctcgtcctcttcctcctcctcgtggtgtttcttcctgaggtgtttccgtcttttccgcttcttctggaggctgctcgaatcgctgcccaccgcttcctccccgctctcgctgtcttccagcaacttataagatcggttcttctccagcagggctcgggcctctcgctcagctgcccgagctggcttttctaccacagccttccgtggtacctgtgagtcggaaacaagcggttgtgagcagctcctgcctcagcctcgagctcaaaccaggcgtcatcattctctgctcaatcgggccctcagcgtctgaacttccttccatgcatctgtttagcaaatgattattgaaaactacccgatggtggagggcgcgacccagcacccacaggttgccctcggacatccacccacaaatggatttttttttttcttttggttttttgagacagggtttctctgtggctttggaggctgtcctggaacactagctcttgtagaccaggctggtctcgaactcacaggcctgcctctgcctcccgagtgctgggattaaaggcgtgcgtcaccaccgcccggccaaacggatattttttaaatgatttattttttatgtgcatgtgttttgcctgcattgtgtctatgtgagggtgttggatcccctggaactggagtgacagacagttgtgagccgccttgcgggtgcttggaattgaatcagagacctctggaagagcagccagtgaccttaatctctgggccatctctctagccccacaacagaatttaaaaaaaaaaaaaaaaggcccagagttcaagtagtttacattctacaacccagttcccttttcacatttatcttttatttatttacgtgtatgggtacctgtgtgccacaagagacctggatgctgggaacttcagtcctcccgaagagcaacaagggttctctccgggtctccatcctatgtctaaatcgctaattcccacggctccactgttctcagcgactttcccccagtacttgggactgaaccccaaacttactgtacgctagacaagcactctaccaactgagatacgtcctcagccctgggggggggggggcggggctgcactgtattcaccgtggctaacaggaccctaggtttaagcatgcttgcacagccctctctgctaagtctcctccacagctctgtacctggggtaacagagggcaaaaggtggatgtttggcagagccgggcgggagtgctaggtctctctgctatgggaggcgctctctgtctctccgtctttctctctctgtgtgtctctgcaagttcgaagccagcccgtgcactacactgaaagttgcaggctatcctccgatacactgctagcttacgctccatcaccaggccaaagacgagcgtgcgtgcgtgcgtgcgtggagcggtctacatcagctcgggtggacggcacacaccttgctccagagcctgagcgcgaagtcccgcgccggcccgccggtgatgttgcgctcggtcagcaccagccctgtgtactagaaagagcgtttccagagagtgcgataaaaggaagagaaataaggtttaggaaacaaggcatagaacaaggtgctggggatattgctcagagaactcgagttcgattcccccagcacccatattgctcaaaaccaacgattcgtaactccagctccagggggaatccaacgccaaacacacacacacacacacacacacacacacacacacacacacacacacacaaaatagaatttgtgttatgnnnnnnnnnnnnnnnnnnnnnnnnnnnnnnnnnnnnnnnnnnnnnnnnnnnnnnnnnnnnnnnnnnnnnnnnnnnnnnnnnnnnnnnnnnnnnnnnnnnnnnnnnnnnnnnnnnnnnnnnnnnnnnnnnnnnnnnnnnnnnnnnnnnnnnnnnnnnnnnnnnnnnnnnnnnnnnnnnnnnngggtttctctgtggcttttggaggctgtcctggaactcactcttatagaccaggctggtctcaaactcacagagatccacctgtctctgttgggattaaaggcgtgctccaccacctcccggcaattaaaactatttttaaaaagtaatttaaagctacttactagaaatatgtatgttgggcgggagttccggtatcttaagatttttttctcgccggtcgttggcggtgcacccctttaatcccagcagaggcagggggatctctgtgagttccaggccagcctggtctccagagcgagtgccagcataggctccaaaactacacaagaaaccctgtctctaaaaaccaaaataaataaataaataaaagatttttttctcttttttattattaatttattttttatattccgatcccagttccccctccctcctttccacccctccctccactccccctcctcccatctgctccacagagagggtgaggcctccccagggaggtctactaagtctgtcccatcatctcactgaggcaggaccaaggcgcctctccagccccacacccctgtgtctaggcttggcaaggtatctctccacgtaggatgggctccactaagtcagtttgtgcattagagttagatcttggacccactgccagtggcctcatatattgtcccagtcacaccattgtcacctatgataagggagtctagtttggtcttatgcaggttccctaagatttttttttttaattatttatgtgcatgcgtgcttgccttcgtatcggcaccatgtatgtggaaaagtgcctttagatccgggatgtggtgcctctccacagctgcagttaaagacgattgagagcctgagttacctgatgtggattctgggaaccaaaaccaggtcctctgtaggaacagcgggtgctcctaaccactgaccgtctctgcagcccttctttctgttttttgtttatgtatctataaacattttacttgcgagtatgtacagcacccagaagcctcaagagggcactggatatcctgaaacggtagtaataggggagccattcatcgtgctgggtgttgaaacggggtcctctgcaagagcaacaagtgctcttcattgctaagctgtctctccagccacctctctccccccaaccccttttctttgttttgagtcagggtctcacacgcattagctggccttgtatatactatgtagctaaagttaaccttgaactctaaatctcctgatgctacttcctaagtgttgggattatagacatgtaccacacttgaaatatgtaatttatatacaatcaaaaataagaaaggttgctgctggtggtggtgacagcatactcctttaatcccagtactcaggaggcagaggaaagcagatctctgtgagtttgaggccagcctgatctacagagccagttccaggtcagccagggctacacagagaaaccctgtgtgtgtgtggggcggggggttagagggaaggaggcaagtattaagtatttcaaattggctgggcgtggtggcgtatgcctttaatcccagcactcgggaagcagaggcaggtggatctctgtgagtttgagaccagcctggtctacaagagtgagttccaggatagcctccaaagccacagggaaaccctgtctcaaaaaacaaaaaaaaacaaaaaaaaccaaaaaaaaagtatttcaaattgatagggtgcagggggaatgaataaggtcaaaatactcagtgttgaaaaagcaatcttcacgctgggagtgaagtggtgcacacctttaatcccagcactcaggaggcagagattcgagaccagccaggtctacaaagagagttccaggacagactccaaagctacagagaaaccctgtcttggggtgaatggtgggtggtgggaagcaatcttcacatagatgttattaacagcttagcgcatacctactgttaatggtttgctgtgagttaacccttcctagcacagatgaccgggagaagcaactcaatatctgagtttctggaaagtgtcctagagaggcacagatgtggcctctgaaatgtggctgatcacatgacctaagaggcaggactgagttctggaataatcaatagtctttatttcctttcccactttctgtaaagcctgcgctagagagcaaacggaagttttctaggatgctagtccactgctttgtcagatgcaagctttttgaataaaccacagctccaatactctcgtctctgcccctggtattccttgttggtgatagacagcacaagttacaaccggtcaggtccaggaaactaagcgtacaggacagtacatgcttgaatttgttcctatttgaggaattgaggccaaataatcatctgagccagggagatcccaaagaacatggggaggctctgccttttctgttgtttttggtagtattgccttggtttgctattgttcttttcttgtctcagtgacccaaatctagttgggatttgtttaagatttgtttttgggggctggagagatggctcagaggttaagagcaccagctgctcttccagaggtcctgagttcaattcccagcaaccacatggtggctcacaaccatctgtaatgatatctggtgccctctttctgacctgcagggatacatgcaggcagaacactgtatacataataaataaatctaaaaagaaagaaagaaagaaagaaagaaagaaagaaagggtgtgtttaaaaaaaaaaagagagagccaggcgttggtggcacacgcctttaatcccagcactcgggaggcagaggcaggtggatctctgtgagttcgagaccagcctggtctacaagagcaagttccagggcagcctccaaagccacagagaaacctagctcttgtaaaccaggctgatctcaaactcacagagatccaccagagagagagagagaaggggctggagagatggctcaatggttaaatgcacgggttactcttctagagagaatgtgtttgattcccaggccccagatggttccgggatgtctgatgccctctgccctccacagactccaggcacgaaggggtgcacagacatacatgcaggccaaacacccattcacacaaaatgaaaacggaggaaaattttaaaagagagagcaagaggcagcaagagcgttgaaaagagctccattttattatggaaaggtacaaaaagaaacaaaccaggcaattggtgaaggagcaacagggaggggtgaggcacccccgttagtccccccacactgcaattcaattcaatgtgaaccacgtgggggaacagaattaaataattctcatggggttcagagtgaggatccccagccttccctcttgggggaaactgaggcacagtaatactgagcaaagttgaagaaagccacataatctccgcaggtcactctcagtaggacaaacggagggtggtggattcctcgggaagtctgcaaataggcatagcttgtaaacctgggactttgagaggcgggaccgggagctggtgggcatgtaaaccaggctgtgatcaagcgaggagaaggaactgtaaacaaagggtagtgacctgggaaaagggtgcttgtgggtggagtgggttctagacctcccaagggagatgagcccttaaaccctgagtgtccccgggagtggcggcaagtcaaaggcggctgtggggacagtgtaccctgtcaaggagctggaggtgctccatctaactcaattccaggtgaatcctgtgttccactcaaagactcgatgctcgttcttagctcaccaagggtgctccagcccacgggggaccttgggttaggggtaaatttaggctactggctctgccccagaaacaggatgggaaaagcaagtcggaatatgctcattgcccttccctgccaggctcattgccagggtctgttggctctgaatcttccagactccaggatcttcaggtatggaagaggtatgtgcccaaactgggagatggtcaccgccggcaggactcatctgcaggaaaagaagtgatgaagatggagaatttgggggnnnnnnnnnnnnnnnnnnnnnnnnnnnnnnnnnnnnnagtctccccatgcaccctagaactgaggagggctggtgtgagagaagtctttacaatgtgttcggtgtgtgccagtcaccagcaacagtagcgatcacagttagctgggactgtgtactaggccccttgtttaatttcacaatcacctcatcaaaggtgaagtaacttaatatctagctatagtcctaggccttctgcaaaagtgtctggattctttcaacagctgcaggaggtagtgattattatcacattttcatggcgctgggaccttgcctgctcgtctgtttcagccagggtctcaatctgtagagcccaagcctccctggaactcactatgtagaccaggctgtccgtgtacttgtgtacttctatcccagcttaagtgatgggattacaggcatgagccacccatgctcagctctaggcaacaatcttatcaacaagctgcacactccgaagccccagacacagttattaactctgttttaaagaatgataaatgcagcctggtctacagagcgagttccaagacagccagggttacacagagaaaccctgtctcaaaacaaaaaaacaaaacaaaaacaaaacaaacaaaaagaatgataaaatgaaggctagggatactgaccagtggtataacactcacatagcgtgctaaaggccctggattcggttcctatagtgtgggcatgcacaccccacacaagataaactgaaaccgggctcgcacacgtatccgggatcacaccataagtaacagtaacgctggaattcatactaggggccgtctgacccaacttgggtatttttaaccaaactggagttctggttttgaaacgtggagactccgcgtctgcaggagccggttggaccacggacaccagggggcgccctccgccagccgcttacccacgattagggccttggtgcgcagcccgccctggagccctggctgcagcagcaactcctcctcctcctcgtcgtcgtcgtcatcaggctgggtcgccaaggggatgggagcactgggggcctcaggctccgggcccagatccgctagtaccgagctctctgaagggtactggaaggtggtctccagggctgtctcactgaaggagatcttgagctgaggatgtgaggcgaggggggaaaagagggcaagctcattactaaagcaccccaggggggtcccagagagcacttgcatggagggggcgggccgaagcttgattttttctctccttcaaatgacaccaaacaaaacaaagcttaggggctggagggatggctcagtgagtggttaagagcacttgctgctcttgcaggggacctggattcagttcctatcactcaccaggcccctcacaaccacctataatccctaggccctctacaggctccaggcaaaacactcatacacattaaaaaaaaaaaaaaaaaaaaaaaaaaaaaaannnnnnnnnnnnnnnnnnnnnnnnnnnnnnnnnnnnnnnnnnnnnnnnnnnnnnnnnnnnnnnnnnnnnnnnnnnnnnnnnnnnnnnnnnnnnnnnnnnnnnnnnnnnnnnnnnnnnnnnnnnnnnnnnnnnnnnnnnnnnnnnnnnnnnnnnnnnnnnnnnnnnnnnnnnnnnnnnnnnnnnnnnnnnnnnnnnnnnnnnnnnnnnnnnnnnnnnnnnnnnnnntgcttccatatatatctgcacaccagaaaagggcaccagatctcataacagatggttgtgagacaccatgtggttgctgggaattgaactcaggacctctggaagagcagctggtgctcttaacctctgagccatctctccagcccccaaaaacaaatcttaaacaaatcccaactagatttgggtcactgagctggctcagtgggtaagggtactcatacagtcaggtctgacgccctgagtttactctttggaacctctgacctacacacggtgctgtgtcaggtgtgtccccacctccaaaaccaagacaaaaaaacaaaaaaacaattatagaaacaaacaacaacaaaacagccaggtgtggtccctcataccagtaatttcaacactcagggggttgcactaagttccaggccagcctttcatgtctatcaaaactgtctaaataaaataaaaactaaaatggtgggcgtcggtggtagtgcacacctttaatcccaagcgctcaggaagcagaggcaggtgggtccctgtgagttgaggtcagcctggtctacagagagagttccaggacagccaggattgttatacagagaaaccctgcctcaaaacaaaacaaaagtgagctgagtatggagacacactcctttaaccctagcactcaggagaccagtctgaggccagcctgatctacattgttagaccctgtctttcaaagtaagccctcccatgcacacaccagaaaacaagagattttgtctgtggcaagggctgggaatttggtaagtaagattaagaccagatctctaccctttacagccatgaggcagaggtataaaaagaaactgaagtggacagagaggcagtgccgtggccaggactgggactctggggacattccgaaggaggtgaagtctgagctggccaagcaggaaaaagctggttgggaagggagtcccagaagggaccttgtcttccacagccatggggctttgatggtcccgaagaaacccaggctgcaaagagcctgcacctcccactccctttctcccatcccatcctacaggtccaggctggggattggataagacaatggaaaggcctatctgagccaagagatgctcaacacacagaagagtccccggaacatggaactggagaggtgacaaggatggagaagaaagtccaggcaaacactgggtaggggtggagaggaggccagacggtacctgcaaaaacagaagcagggctggagagatggctcagaggttaagagcactggctgctcttccagaggtcccaggttctattcccagcacccacatagcagctcacacctgtctgtagctccagttctaggggatctggtacccttacaccaatgcacataaaataaagttaaataaagtattaaaagaaaaaaaaaaaagcaaaagaccagagatgggtagaaccccttaaaaacaacaggctgtcttcggggtccctttgcccttcccctttgccctcctaaggaggacacagtgggattaactctgtaaaccagagggtttagggagacaaagaggagggattccaggcgatctacccagggtatctgcgggccagcatcccagggcctccatgtcatctataatgtgggctgcaagaggctgaggagagagatgtcacagcttggtacctcaggaaagcagggtgaccaagactgtgtatgtcatgcttgaggtccaaatcctgcaatgacttcttttcttaatctcactttgaacaaaatccagagcctaactgaaggcaacaggtggtttccctccgctcccaggtgcatccctctgcctgggatattcttcccccaaatgccccccaggctcctcaactccagggcattctgtttgggagttgccacatcctactctgtgtcctgaccctgtcgcacacaaccttgcactaatacctccatacacattaacctccttctaacctgctggggaacctgttaatgtcttgggggagtctgtagtaagacctcttcacacagaatgcccaagtgtgctcaagtcctccatgtaccttcaagtttatcatttattttgttctggggactctccccccccccccattttatgtttagcgttttgtctacatgtctgtgcaccctgtgcggtcggtgccagaaaaggccagaagagggcatcatatcccctggaaaactgggatggaggattaagagccaccatggaagcgctgggaactgaatccaggttccccaaaagagcagcaagtgctcttttttttttggggggggggggttagagacagggtttctctgtggctttggaggctgtcctggaactagctcttgtaaaccaggctgatctcaaactcacagagatccacctgcctctgcctcccgagtgctcggattaaaggtgtgagccaccaacgccctgcaagttgggactgctgtttccgcccggtgcaacaagtgctcctaacggctgcaccatctctccagtcatcatttattattattatttttgagactggggctcactaaatagcccaggctggccttgagcttaacacccacagatggaattacaagtccgagcctgagtgttttcggtctgtgcttggctgaaaccgtgtgtgcagaagaagactgagtgtactggctgctcatatacacggttgccctgaaagggaatttaccagttgccacacctgtctagacatcaggtgaggtcccagcagaggatcaaggctaggagggaaggccgacagaataagggacaccctccagatgggccacaccccggaatctggaaagggacccattctggttctcctcttcctcagttccccttctcagccctgcatttatcagttctgtaaaaagattcattgtatccacttcagcgacttcggcgacttcagcatcaccccttgtgcctcactccccccagttctgactgggcttctcaggaatgcacagccccaatggggggggtagggcagggagggaagtgactcactggctcctctctcatcagctatataaggtcacaagggggccagggaaggaggggcgggtctccagccagagaggccgctggctgaggaagagcaccagctcagctaacaacagcctggttcagggcaggggtggcgtctctcacgatgatgcagtctgaaaaggaactactcaggaaagggtgagggacggtggtaatggctgggtcgagcagggcaaggcacattaatgctcgctgaggctgtacagaggcggaggggtagataagatggtcatgtctagggtagacctcggctgcctgctccccacccccacccaccccactggtcccccggtgtggctggcttcctgattctctcaccacatcctgagcacagctctggcaggtccccaggcccagtgttcccactcagtaccaccagccttccggcccccaccccaggcttcctgtttggaaggtctgcttccgcccctcctatttgatgacctaggtatggtcaccatcaacagggcctgctctgcactgggttcctcggcttcccccagatggttcctaggctcgggccacaaagccctatgtcgccgccctctgctcatttcccaaagacacaaggcagcctcagtaggaagcgacttttctaagcgcctcgccctgggagaagttcctgagaggagagggccaatagcagtttgagggctcagggtacatacgctcttaggaccacccctggagcttcagtgaagctgggacagaggcgagaggacagaagtcacattcagacattgctacaatgaaaatgagcattctgcacatagactaaaaacaacaagatgaactgggagcaaccacgtgaccccgatctttggtcttcaccgtttcccaccgacaccaaacagacacagttaaatagaataaggaggggcaggctgcacaggccctgggaagatgcatgctggttgggcggaagactttctttctggtctgagacacctgagtgtaagcactgttcttccccagagagtttttactgaggaaaccgattggagcagaggaggaaggtgctgggccaggacagagggagaagttatcctgtccagtgtttccttgtatgtctacattccagtgtaacctctgacctctgctggccccagctccacccctgcccccaactcccacagtgcctgagccagtctctctgctcagttcagtgcaaatgaacttctctctttttctaccccaaggggagggagaggccagggtaggagggacagaggggaaaaccaaggctgagccagttctgtgggggaggggacgcccagggaggaaagatgggggaagggactgggatattttggaagaggagaaggcttttcttgtccccagagagaaggaagcactgtctaacattggcccagttggggggacagacaaccctgaggtcacccacttcaaatggcgtctgtatgcctctgctggggaggggggtagctaacttggggtctaaaagctttctgtctgctcttcagccagctctgctctatctcactaggctctctcctcaggacgttctcgttcagttctgccccttctttcttggaactgagaccctcaccccaacttccctgaacttctcccctccacgtctgccctcccgggtattttcaccctgccttcatggttacaaggtggttatctcttctctcctaccagaagggcctggctgggtcaaaacctcaaaagaaagggagagagagagagagagagagagagagagagagagagagtgagaaggaacagggccggacacaccccaacacagcagttgacttctgtgcagaatccttggtgctcccaaatgaatggcaaaggagggctacccggaggaagggtgtgtatgcaggaggaggaagggaggcggcagggataaaaaatagaagacgagagcgcaggcatataaaaaagccatccagtcagagctggaaggagacttctctacccagtcaggcgtggcagctttcttacctgtttgtgatgtctttccggggaccccttggcaaggcagctgcggctgagacggaggtagccccccagcaccaagatttcctcagcagttgggtaccgcttcttcccgggtccaggccctgcagcatcagcggtggcaggggtggccggaggggctgggctggcagggggcacacacctccgtgggttgacagtgaaggtgtgtccgctgcggcggggggcccccacccccggccctgcctccactccacagaacgtcccggcccctgcgtgctccggtgggaggggggagggcccagagcagaggttctgctgagctctcagaggcctgctctgagcctccgcctcctccgtctcagcctccctctcagcctccacaccagactgccccaggtgtttctctggagatgctggaggacctggcttctgaggagtctctatgtcccgagacgcccgttctcgagccttcccagagttcagggtccatttccagccctcagtgggcctggagatcctgtctccatcctccgcggggctggacctcagctcagcagactgcacttctccagaggcggtgtcttgaacctcctttgtcactggagactggtctagggcaatccctggactcagtgtctcttcctttcttccagactcctctaagtagtcttttctctcttcccttgagttcagcctccactctgcggcctccggctgtatcaagctctgtttctggggttctttcgggtcaagattccatttatgggcctcaggcaggcaggccttctggtcaccagactcccccaggctcagtctgctttccgatacctcttttctcttgggactgtggtctccaggacttgccaatctcagactctcctctggagtttctccagggctcagcctccatttctgagcctctgctggtctggaactcaggtctctggcttctgcagggctctgcctccagtctccactctccaaagtcctggagcatgactcttgggctccccctatcaccagcctcctatctctggtctccctgggacttagtctctcctctcttgactctcttcccttggggctctgttctcttaaattaccaggacttgatctccgctctgcagcctcgagaggcccgggctttctatctgcaagcatttcatttcgctgctgcagctcctgctgccgctgtcgctcctgctggatgaatcggttctgatgtaccggcccaatggcctccaagaggacagcgggttcatctgggtctggaggtccagcctctgcagtcccagacacagagctcgcctctccaggaggcaggcccaacttggctctgcgtcgttccagaatcccccgcttccaggctggcatctgggacaggcgatcccgttctgctttctcacggccacgaaccgctgcctcctcctgcctccgccgggctagcaactgtagcttccagtctgggatagcggtcatggtcactggaagtgaggaaggagagagcactcggggacggaacaggaagggtaggcttcggaggggcccggcgactgagaatgggggtggaggaggaggaggaagtgatgcgggaagagacttaagagcagagggcagtggagctaaggatgaagagagagggaaaccgggagaggagggagggcagaagaggcaagaactggaaaagtgaagagcaaagctgggtgccaagttgggggtggggataatgggagaggaagagtcgagattccgggcagaggcagcgccagattgggggttagtgggcaccagatagtccctaagacatgagaaagggagggaaggaaaagcaggggagaggagaagacggggatgggggctgagaagtgagcgcgttcagtccaggctgcctccccggtacccaggggagacaagtgggaaggaagaaccgggaaccggccggcgagggggctcaacttacacgccttggggtccctaggaggaggtgcggtggagccaggcgtcgggagagaggaagaggagcacagaggcagagggaggtccggagggaggagggaagaggcagcccgggaggagggacggggacgcagacgggggccaggcgggggcggggaccgctttgtctacggacaatggggcgagggaagggggcgcagggcggagcccggcgcagggcggggcttcgccgccctgcttcccgcgtgggaccctgcggtggcactcccctcctgcagtggggcagcccacagctcttcgttctgtctccagaggccctcacccacttcctctggcagccctggagaagctgggtgtccagacctcttgctccagctggccgacccggggcgtcggcccgtgactcaggccccctgagggacacggggaggaagcggcagctgcttggagtcggacccgcccttcccatcgctcgccgctcctccccgtgctttttgctctccttggccagtctttgttaccgtggtggtgtgggcggctgccaggccccaaagtctgaggcaaatggctttgggagtttgctctcctcccagagatttactcttgtctcccacgggttgcctgatctataggcggagaaattgtaatatttggagggagcaggactgggtgactgggagatgggggcgggcccttggggtgtggccccagcccagcgggcgtcacagtgcttggctgctcctacaagaacttgctcggcctcggcttctttcccacacttggtcctgcggcttgagagacagggacagacaactgaacaccatatgtaaaaaattttttttttatttttatgcagcgcataccctttgggagagcagggagccctgagtcagcccgagttaaaaacagaaaacaaaaaaacgagagacatcgctgtagaagacccaattaaaaaactggagacaacaaggagctgtaaggcagggatggggggaaatgcacaaccgcggtgcagaggagatagccaactacctgcaaacttgcagactggccttgacatagctccctgaagtggaagctaggaaggggaatccctgaggtgtagagccagtaacaatgccagggcagtgagtgctcaaggcaggacccttagcctctgtgtgtgcgtatgggaagccccaagagatgagattcgtgtgtgagtgtcacaccccaagagttgagatgagattcatgaaannnnnnnnnnnnnnnnnnnnnnnnnnnnnnnnnnnnnnnnnnnnnnnnnnnnnnnnnnnnnnnnnnnnnnnnnnnnnnnnnnnnnnnnnnnnnnnnnnnnnnnnnnnnnnagaggtagatggacctaaggtttccagcctctggtctggagcaaacaacagggcctggattaaggggttttgattttgagatagctcaacggctggccgatagctcctcattctgcttccccatcctggggtctggagaggagctggagttttctttgtaattgggaccgaaggtagcggagatcttgctggtcgagcccgtgagccaagccaaggtagagggtaaggagaagagccaggaggaggcgatccgtgcccaacgtggggaccacccatagcactgtcagaagttccacacatactgggtgtcgaaggtgggaaaagagcctcagggcccgaggagacttcagggccagaggttcacccagccccagtacgtggtaatatacctaggagagagattacagcatggaaatcaagctctctttcttagctgactctgacctcttcctggcaccaccttgttagaaatcaggcccaggaccctttttgagactctaccccaacctgtctctggtccaggcgtcatgctcaagcccaaagacctatagttattggtctctgaaggaaagctgaaggaagacagacaatcataaaagggaccagaaagccgagaggagttgtcgggagggtacgggagggagaggattgtggacataggtctcaggcagggatgtgggatcctcacctgtttgaggcccatgagttcagcgtagtcaaacaccagtaggatgctgaagatgaggagccaggaaacgacatggagcacaaagcagaggaggggcacccaggtggcccacggttcagcccgagcctcccacaacacagggcctctgggtacagtctcccagtaccgcatcaccagctggggaaagacgagacactaggcatgccagtggtctcccttgccccatggtaacctacaactctttcgcccaggtatgaagtatttaccatgcggagggttctggatcgggtactgaggatatgaagacaacccatttctacacaggatttacagaatgtttgggatgggggctggtggatatccaccagagatccaccagactagcctatggcaaacatccagtgagaagactaagctgaaggcgtcttctcttgagacaagataggaactaaggagaaattaagatctcaagcaaggccgggcgttagtggcgaaaacctttaatcccagcactcaggaggcagaggcaggtggatctctgtgagttcgagaccagcctggtctacaagagctagttccaggacagcctccaaagccacagagaaaccctgtctcgaaaaacaaaaaaacaaacaaaaaaaagatctcaagcaagctgggcagtggtggtgcacacctgttgtcccaatgctcaggaggcagaggctggtggatctctgagttccaggacagccaggctacacagagaaaccctgactcaaaagaatcatactgtactgggacatgtcaaaaacagaactttgctgacagaatggaatatacgctctgggagaatggaagctgagatgagcatcctctgtttcttatgcactcatcttgtccctccagtgtaagcacaccatgcatgtcccttggcaatgcctcatacctgcaaggccagggcagtgcatgccacatacagtgacctctgaaggactccaaagtaccgggatgtccatgtcttcactgtctcagttgccatgaggctgtgttgcaccacaaacaatagcagaaggcccagatcccaggccagggaagtcagaatgcttcggtcctgcaaggcagccaaccacccatagcgggcctctggggggtgggggtgggggagaaagggacaaagggacagttgaagtgactagaacattccccttaccctcatcttttttggggggagggtttcgagtcagggtttctctgtggctttggagcctgtcctggaactagctcttgtagaccaggctggtctccaactcagagagatctgcctgcctctgcctcccgagtgctgggactaaaggcgtgcaccatcaccgcccggctaccctcatcttcttttggagtcctataccatgtccccgatgctttcaggatcttgtcaaagccatacccagttcgatttcctgttctttccatcttccctggtttccttctggggaagaaggctctcaggagaatgcaggcaggggccgttattaaagccaccgtgggagggctggggaggtggctcagtccattagtgcactgaattctaccctcaggacccctacaaaaagcccagcacggcggtgtgtggtggtaatctcaatgctggggaggcagcgggcaggaggatcagcagaggggcctgtgccatcgctcagtggttaagagcaccggctgctcttcaaaaggacctggtttgtttggttctctgcacccacatggcggctcacagccatctataaccccagttctaggagatccgtctgacatagttggcaggcctctgatttcaacgacagactgtccccaaaatacttaggaggcagaggtagatggaccaatgagttccaagccagcttggggtaaatagcaagtacctgtctaaaaacaaaaaagtggctagttcctgcagacagatcaagactggccttcagctgcgcctgcacacacagaaacaaacacaagcacacattcctcattattcacactcacacacagcaaggctggggaagtcatctttggtgtggctttttttgttgtttttgagacagggtctctctctacatacataacccttactcagcagaccaggctggccttgaacgcggagatgggcttgtctctgcctctccggtgctaggatcaaaggcgtgcgccaccatggcccgcttcgcggtctcctaatgtttcctctttttacctttcccctgtccctagttctccccacgaaagcctacccccacccctgcataccctgtcagccctcactccccagcttctgcaccgggctaatcttggagtttctgatttagccttctgttcccttccctgcggcgcctggcagctttggcgtttccctgtcatttgtttccgcgccccgccctctccacgctgctctggctcctcctctccgcttcagctcgccctggatccctgcggctcacccggaccgccggactccgggatccctccaagcagcggccgcagggaggtgaaacgcacgaactccactccggtgccaaaggccaggatgaaggaggcgagggccgccgagaccagcagcagcgccggggccatggcgagcggtaagcagcttgccgaggaggcggacccgggggtcccgcggcttggtaaggccnnnnnnnnnngctcggcagccacgcgcgtgggtcgaatcttagtgcggccagtgttctcatggaaagtgaggacagagcctcccttgcgtggaaacaagaagaacgtcctgttttttttttacaatagccactccttatcctccagtctcagtccctggtgtgtggggttacacgcggtgccgccacgccccacgatggttcctgcctgtaattctagtactctgaaggccgaggcagcaggattgaagttagcttcgactgcacatggagacgcagtccgaaagaggcataaaaaatgaaaaagaccatgtggtgaaagggtcagtccgtagctatcctagtacaggttcctcagttttcagatagaacaaggtcattgagataaaaatgccccacacaagcaaaggcaaggccctcaggctgagcgataggggaccgtctaggagcacccacgctggatgctccctctgctgcggggccaggctgccttgcgttgctaacacatttcctccccagcctgctctctgcttgggaaatttgtactgagtgggctgcgtccgagaatatcagtgtctttggggaagttccctctgcatactgctctctccactttttaaatggcagaatcttcatgtagtcaggactggcattgaacttgctagtatgtagctgagaatggtcttgaattgatcctcctccctctgcctccaagtgctggtattacagtataacaccatagtctggctccaccgttttaggggctctgaagagcttgtaggtgggaaacaagggctgcactaagctttgtggtttctctttacccagcttcatccttaaacatattcataatccaagtcctaggaaggcagatgcttagggctcacctgccggccagccagcctagcctaattagggagccccatgtcccagtgagataccctgtctcaaggaaaacaaagtggactcctgaagaaggacacccaaggccgacttctggcttacccaggcaccaaattaacagaggtctggggctacagtttaatgtgaagtatttatttgagtagcattgctgaatccccaacaccctcaaaagtaaaatccatagaggcacagcatacggcaggggtgtgaacaggccgactttgatgccctcacctggagagggcaactaggtgacatatacaacaccagagtagttctggaagcattgcagaaaagtatacaaagtagcaactatatttttattgaaatgaaattcacataaaaaagagacatttagcacagtagcatttaatattctgcactatgtacaacctctttctttctggctccaatactctcaacttctcacaatgaaacgctagactccttgagcagcacccctgtcctcagagtctgggatgcactgatctgtttttttttttttttaaagagtttattatgtatacaacattctgcccccatgtatgcctgcacaccagaagagggcaccagatctcattacagatggttgtgagccaccatgtggttgctgggaattgaactcaggacctctggaagagcagtcagtgctcttaacctcagagccatatttccagcccaacactgatctattcttaccttcatgaattcacccattctggatctatctcaggcagatggaatcaaatgtgtcctctgtgtctgggccttttacttagggtcttcttgacactcgccctcaaatacttcatgtctgagcattcctttttgtgcacacagcacatttatatcttcatccttgctgaacaaacatctacggtttctgttggcttttcgagacagggtttctctgtgtagtcctggctgtccaggaattagctctgtagaccaggctggtcttgaactcagagtttcacctgctctgcctcctgagtgctgtggttacagttgtgtgccaccactgcccagccgtctacagtacttctatatttggccatcttgaaaagtaataaggggctggaatgaggctaagtggcaaagtgattgcctaggaagcattaaaaaaaaaaaaacatacttcccccccccaaaaaaaacatcaagtgcctgtttttcatttttgagtctcttgtagctttaggctagcctccaatttgctatgtagccaaagctgaccttgaacttctgatcccacttgcccctacctgcacagctggaattcgaggccaagtgcagggggcagagccattctgctgggtcatatggttatcaggcaggccagatgacctaccatagagatgatgaaaactaacctcggaaaaacacaaaacaaacaaaaccctgtttctgttaagacagggttttcctcagtaacccattctgaactgggacttttggccatcctgcttcagcgtctacatactgggactatgggaaatgctcctgaccagctttttacttatcttcaaaggaacttgcaaactgttgactgcagaggccaaaccaaacacgagcagtacccaagagtcctactttctccacaccctagaaagtgaccagcttttaaaaacaaatgcgatttaccgatttactctaaatcgatactgataaatgaatgcaagttcaaaacggtcttatgccactccagaaattcaccattagggaggctgagtgagcaaccgaccctccacagagatgaccaaagctaacagcaaacactggaaaagcaggccatgtgcagcaaaactaaaagccctttctatccaggagtcacagaccagaaaacatcccatgagccaccctcatcttctcagtcaggtatgcctgggaactggtaagaatcccgggaagacaaggaagggggccaaaaccaggcagggtgctgggactgcaacagcggcttagccattgtggctgcaggctgctgactgaaccagggccttcaccactgatgacaagtgctctgccacaccaccacaaccccagcttgggttggccaatttaaaaatggatatcttaggggggaaaaaaatcctttttctttttcaaaaactctttggtcttatacacattcccaaagaagttgtatcaatacaatacatcttagaccttgagggttttttgttttttattttggtttttgagacagaatttcactaggtagccctggctggcctggaattcataaaaatctgcctacttctgccttccaagtgctgactgagataaaaggtgtggaccaccttgtgtagtcttaattgtgtgtgttccttttttcaaatattttctaggaatgtttgctggtctgagagggtagaggtagattttttttttaggtggagaacatttcctaatttgaaaggacaaaggcctctggtgtgacttcctgctttagcactccagtcaggaggaactcaggagagaggaggggcagccccagtcgagatgggatagcgcagcgaggtaggtcttcagtgcaagttatgacaactcggtaaggctgtaaagacacagcagagacagttaggaaggaagggcctggaacaggtgcagggtcagagccctaaaagctgtctcagaactgagactgcatacatttacagtatatgtatagcatgcatgaagcacactgcctatcctatcaagtgtccttgccccgggtggtggtggtgcacgcctttagtctcagcactcgggaggcagaggcagggggaaatctctgtgagttcgagaccagcctggtctacaagagcaagttccaggacagactccaaagccacagagaaaccctgtcttgaaaaacaaaacaaaacaaaacaaacaaacaaaaaaaaggtgggctgaactgtttgagttaacctttggggcaaggacactatttatttatttatttatttatttatttataaaggtgtgtgccatcaccgccacctggctcctcttgactccacctcccgggtgctgggattacaggtctttattactgagtccagttcatgagtgctgggctccaagctacagagaaaccctgttgtaacacaaatattaaaaacccagagatattggggttcaagctgacagtcagttaagcaaagcagttaagccactagctcttgacgtctagctcagactaaattgtgagatcccatctccaccaatcatcagaatgcaatcccagactgctatgctctccttcagcatggctggagactgactgccacatgtgaccctttgcttcttccctttatacctctcaagtcctggggttaaaggcatgggatcccaagtgctaagacctttgtatgggctgtttctcttttagagtggatcaatctcatgcagttcaatgtagccttgagctaacagaaatccatctacctctgtctccagagtcctgggattaaaggtgtataccaccaccgcttggcttctatggctaaatagtgtagctggctttgcattctgatacttcaggcaatctttattaaaccataaatatcaccacattctgtctcggaaaaaaaaaaaaagaaagaaagaaaaagaaatgagaccagcctggtctacaagagcgagttccaggacaggctccaaagctacacagagaaaccctgtctgggggggggatggggttagtgatgttttgggcaggagatgggtaatggcagagactcactcaaagtatatggacttttttttaaattaaaataaatgggagtggagaggttcagcaattaatagcacctgttgctcttgtagagaacccaggtttggttcccagcacccacatggtgctcatagcaatctgtaactccagtttcaggagtgcctgaccagtgcctgacctctaccaacaccaggtacacaaatggtgcatagacatacaatccggtgaaaaatctacacacataaaataagtaacttttgtttgtttgtttttcgagacaggatttctctatgtaatagttctggctgtcctggaactagctttgtagaccaggctggccttgaactcacagagatctgcctgcctctgcctcccaagtgcagggattaaaggcatgtgccaccaatgccaggcaataaataagtcttaataagtaaattaaacaaatatgaggaattgtaataaaatacattctcgaaaagaatctggaaaatattgacacataattgtgtgtgtgtgtgtgtgtgtgtgtgtgtgtgtgtgtgtgtgtgtgtgtgtctgtttgcctttaattccagcacttgggagacagagggtttcaaattcctttttactggagttagtgtttgtaagacacctgatgtgggtgctgggatctcgtgctcaggatacagcaacaagtttcttaaccaatgagccatcatctctccagtccctattctctgtacataatatagattaaaaaaaatatctggggggtgggggaacagagtcccatgcagtccagactgctattccacatgcgtatatccctagaacttctgctcctcttgcagagctgtaatgccaatgtgtggtgtggcaccacacctggctacttggaaacacagctaagcccactggtgtcagcgcctcttcccttccctccaccctgtgctctccccactgctaaggccaggccaggcctgccctaccttataggactggggcatgctgggcaggttggtgcccccacagcagctgatgatctcgcccatctgaggtgggggtggctgcactccaggggtcacgtaaatctcatagccctaaggaagaggagtggtggagacagatgtctgcactgagaggctaaggcgattgggaaacctcttgggggtaccaggggtagtagggaagcatggtgcagaaggcagcctctcacctccagcagtttttgttgccgagcccggctcagggagtcccgaaggctgaagctaaagttcttctcttgttcagggtcagtcaccaagtagtcatcaggtggcaggaagtgaccagcctttctggactaagggaaagaacgggcaggacaccttttcatctgaaaactccttgtgtcttcctctcctccacagtattgaggaatgaccccaagacatcaagcatgctaggcaagtgctctaccactgattcattcaggccctaacaagaaatatctattcaaagcagtcttggcctcacgggtgctccattctccacctcctttcctcccactgcttccttgagggtaggtgagcgggcctttcctttcctgccactcctcgtcttctggcttcttacctgatacagccagttcagggagaggatagggatgcccttccccagggcacacaagaacttgaccgttcttcggatgcgatcagtgaccaagtgggaggcctcatttactgagctggctagactgccacccagagccaggactgcacgctctccccgagaatccacaactcctgtgaacagtacctgggggatggagtgaaggtggtcacagcaaccctcatcagcagcactcacctctcagtccccagcccctcatctcctaccttgggggctgctgcttcttggttaggtttagcccgccggctccgacttgggtttccctgggtctcatcctctacacggtccctctttcttttgccgggtgttggaattgctatctcctgaggctaaaaaacatcacattgggcgtttgagtccttcctataactcttgctcctacctaggggccccagctgtctgtactcttacctcttccttcactggcatttcctcaggatcttcttccttggggactattgtcttctggggtatttgtcttcggggacgtttttgaattggtgaggttgtggtagtagaaggcttcttgcgggatcgagaaacctcaggctggggcttgggaatgagccctgatctcccagctgcttcattttgcaccacgggattctgagtggaggtctctggagcctgggaaacagcaggctcaggagcaacagtaatagactcagcggcttccaatgccaagccttgattgattgaagattgggaaccaggttcagagggtgcagagtaaggcttttggccaatgggaactgtgtgggagccccgtttcccagcagccttccgccgccttcggtggttggcttgaggaatgggctccaggagaacaggctgggctgtggggacaggtggctggagttcagaggtggcagaaactggagaagcacttagtggtgaagactttagtgttatgctctgacctgtcacctcaggggcaacaaggtctgtggagatgggaggttcaaaatcagaggctactggtccaactgattcagaatcctcaatggaggacttacatgcccttcccaaagtgcccagagctgtggaggtgggaagctggaggtcaggaccagtggggacagctggttctggggttctgacagacttacgtgacctgccccgagtggcccgagatgtgggtttaggtgtgacaggctgttctgtggaggtgggaggctggaggtcaggaccagtggggacagctggttctggggtcctggtagaagacttacgtgacctgccccgagcagcccgagatgtgggtttaggtatgacaggctgttctgtggaggtgggaggctggaggtcaggaccagtgggagtaagtggttctggggtctggatggaagacctatgtggcctgccccgagtggcctgaggtgtggggtttggggtaacaggctgttctgtggaggtgggaggctggattttgggacctgtgagaacaactggttcaggcgttttaacaaaggaaccatttatgctgccctgagtgactggagatgtgggtttggggatgacagactgttctgtggaggtgggaggttgaagctcagagtctgtagggacaactggttccggggtcctggtagaggacctatttgccctgcccctgccccgagtagcccgagatgttggtctaggggcagcaggcaggtttgtggggcaggtagtatagggcttaagggcagcagaggagtgtggggaggaggtcatcctggaggaccgccgaggcctgacattaggcttggtgtgaggagtttcaggaaggtgtagctcagaagggggagaggtaagtaacagagactggggtgtagacggcttttggctctgagaggtgagcagactctgaggtggagaagaagcttcaggaactggagaaagcaggcgatgggccgagggttctggatcaccctgaggaggaaaagcaagtgataaaaggcagcaagaaggaggtgggccaggctggagagatggctcagtggttaagagcactggctgctcttcctgaggacctgagttcaattcccagcacccacatggcagctcacaactgtctgtaacctcagttccatggggatctgacactctcacacagacatatgtgtaggcaaaacaccaatgaacataaaataattaaaaaaaaaaaagaggtaagcatggatcttgatctatcctagtgtttctgaagaagggcctcatgtgactgcagtgtcctccacttattcttctacctctgttgccaagtgctaggatgacaggcccgttaggttagtacgactggctttgattctgttgatggtcacagcatgctcactggccacttctttctgtgtcctctctttaggctaggaactccttgagagaggaagcaatcttttggataccataagggatctctcttcataactttagtacagtgttctgtacaggtgggtgtacacagtaactaagacacggctgggcagatagggcagtagcacaaagagatttgtgagtcaataaagggaactgccacttgggaacaatgggacacaggaatagacgccaagtaatgagtgacaatgaagaaaacgggaatgtgggactagggaaacagttcagtaggcaaagcaagcaactaggatctgaatttgatctccagaacccatggaataaaagccaggcagagtgacatatgcttgtcacccagtgctaggcaggtagatatgactgccctcagagcttgctggtctagcatcccagtctatgtcagcaaattctaagacagctcaggatcctgacccccacccttcaaaaaagttgagtggttcctgaagaataacgtacagcttgtcactaggcttcctcactcaccgcccccaaacacacaccctcacaaacatgcatagatgtgcatgcagttaggaaaacaggaactataaacaaaggtacagattaaaggcaggctaggcaatgtggctgcagggacggggacaacatgtgaagtaggagcaggacaaaaatgtagctcacccttgagtcctctccagcagatgccatcttgcaactcaattggcctaatcagagaataaaacaggagaggatgagtgctgtgcagcccgcagctcagggtcccgcccaggggccagctgttaagaggttacatagcatgccgcccttgcttccctctcggctgcctcccaagactcaaaggtccccctttcctccatctccctggctcccagagactatcagggttgatgcaagtccctcaaggtcccccatgcctaacccagggctcgctccctccctgtcgcccctctatccagggtcacttctgcttccccacttgtgtctcttctgtgtgtctttgcacatctccatttctcccttcatactctccttactcccttcagggtccacccccttccccaagccagactctatccctgtctgtctctagccagcaccttccttggtcctctccaccctgaggagttcttccccccacccgtcacgtcttcccccaactgtctgctgtgttctttggtatacccatggctttctccacagtttgcatctctccgccttcaattcccagcggctctgtgtgaaccagatgctgctgtcctgctgatgcactagacacagatgggtgggattcatgagctgcagggtgggtgtccatgagctgcagttcagaggcctcagcttctctcagacaaaacggctgtgtagctaagacttcccaaggcacatcctgggcacctggacctaaagaggatcagaaaaaggaaataggcatgcaggtaaaaaagacaataaggctaagaactaggctaagactcacaaaaggctaagtgggttacttaaggcaagctagaagtaagggtggtagttatgacactgaatactatttagaagattataatctctccttcaggaggctcatctggaaaataaggactgtgtatgtggctgaggagagcattcacctggcatgcataaagccctgagttcaacctctggcatgtagacacaaaaattgagtttctgggccaatcccaaatctcctgaactagaatcagggtaagacccaggaatctgctttgatgtgttatcttatcttttaagatgtatttagaaatgtttcttcatatgtatgtgcgtatatcgtgtgtgtgtgtgtgtgtgtgtgtgtgtgtgtgtatctgagagggccttgatctccagaaactggagtctctctcaggtggttgtcagttgcctgacagggatgaactctgtcctctacaacagctgccagccagttctccagcccatcttcttccccttcctgagacagggtttctctgtgtagccatggctgtcctagaacttgttctatagaccaggctggccttgaactcagagacccacctgcctctgcctcccaagtgctgggataacccagctccatcttgtttttttgtttttttttgtttttttttttttgagataaggtctcatatagtccaggcctcaaactttcaatgtagtccaggctggtcctgagctccggcctctgccgcccaatgtgtatcaccacacctggtatggattttttcctgatgcccagcacttggagacccacaagttcaaatcatcctcagctacatgagctcctcgtctccacacaaacaagagtatgagaggctggagagatgctcaacagtcagcagcactgacctctgtgggcaccaggcatgcccacagacatgatgtgatacagacacatctaacacaggacacagcattaaaggacacagcagaagaggacgagaaaggatacaaggctgagggctcacagagactatcttgtacctggcgtctgcaggctgaggtgggaaggcccaggctcttggggaagagtgcatggaaagacttgcgtaggctcatcttccaaactctggacagctgcacaagaaaagacggctggagcacagctcctcccagaatgcctgtgccccatgccccatcttggccataccatctttctaggactgccaatctaatcccctggctcttactggcactcagatgacccaaacaacacaaggtcctcaccttctgagctctggccctccctgtctacaaagcactgggtagccggaaggcacacatcttcagactctgctgaggagataagagacagacagaatgacaactcaccctcagacttctacagttctctcctgactcttacagccagtttacttcaggggtcaagggcagagcagagagcagcacttaccatcacggcagtctttggcattcttggtcctgcccatttgtactcctctctcctttcctgtgggggtctgggctccctctctctgtggctgagtgggatcccccagagtagctgtaggcaccaccactggctctaccagtgtagcaggtgacctgccttggacccccacctcaagcatgctcgcctgctcacaaacagttgcagcccactctgtcccagcatcttctactcctggctgcttgctttgtcttacatctgccgctgctgaagatgagccttcctccacagctgtttcccaggcctcctcaggaggcaggacttccttccctgcttgtgcactactgtcttctactgtggcagaggaggcctggtttccctctagctgaccaccaggggagcccatatccacaccctggtctacatcatcactggctctatggggagcttggctctctgaatgtgggacagtaagagcctcatctgtgtccatggggctgtcagggaccacttctctcttttcctcctccacgtctgtgtcactgtctttcccagaggcactctggcttcgttctacgaggacctgtggttgggacttgacctcttccatgcctggctccctgctccacagagccatccccctgtctttcagatgggccaaggtgactgctgctgagactccatcttcctcatctgtgtcgctgctgatcaccatggccgtgtggtttctctctggagggccagccactggagtcttgccttcttccacacctgtgccacgaccagctgggctgtcctgcagatgggtcacgacaggtgctccagggtcctttttaccaactccaagcaggacttgcttcttccccggaactacagggggggtcacagggatcctgtcttcttccacgtctgtatcgctgtccacaaagccggaaggctggtgttcttcacccatttccgtgttgctgtccttacccacagtggagcccctcccaaccacagccgctccattgccagcctcactcttgacttttgcatctctgagcttttgctcagcaggctgagccagtaccagctggataccagatgtcactccattagcttccagctgcttggcctctgcagcagcaccatccctggcaactgaagaggactccccaactgctggctgtggacatagctcttcatctgtgtcactgcccaagtcaaagggcaaagacggcccacggacactttgggctggagaagacccctcttcatcactgcaaagacagagagcccacagaatgtactccctggataggccaccccactccgctgtgagggccctgagagtgagcaggcactgctgccaggtgtcttcccatccccactgagcacaccacaagtactcttcataatttaattcagctgaggaagtaattatgcctaggctctcggctccacctgtcaagataatcacctcatttattcaagaccgactctttattcaaaggccgaggtgtctaaaaccagttaaggaagctcaaccctatcgtcccaatcctgatactgaacccagaggtctgccaggagtctaagaccagcttgggctacagagactgtttaaaaacaaaacaaaacaaaagatccaggcatctggtactttgctactcacctttctggtactactgttgctgatggagacgttggattccttgatccatttgccacataccttccagaaggaaaatctggcaagaacaggaagaaataaattgacagtttacaccctcattcctgtctcttcacacacatacacccaaggcacaaacttacctacttcctcctccgaatcctcagccaacaaaactctggaggtttgggaccctccctgtattctgggggtcttctctatagttagaagtccccgagagaccaaaggtggagggacatccaagcgacggtactggcagggaaagtctgcaaacagaattaattcctggtccttcagacgatggctcactccaggggttaggacctttgggggctttaccagttgagtgccattgaggctcccacaatcctggaggataggggctttgttgcaagctgagatttcaattactgcatgctgtttagagatggatggaaaaggcagggccacagagcagtcggggcttcggccaattacattcttgccaaggtagagtgggaaatctaaggatcaagaagaaacattaagttgggcgttggtggcacacacctttaatcccagccctcgggaggcagaggcaggtggatctatgtgagttcgagnnnnnnnnnnnnnnnnnnnnnnnnnnnnnnnnnnnnnnnnnnnnnnnnnnnnnnnnnnattaaaaaaaaaaaaaaaaaaaaaaaaaaaaagaagaagaaacattaaagagtaagggcagagtcctggcctgaatgaagatggtacctactgctcactcaaagctctcacagggttaagaacaatgggcacaccagcgtagaagagcattcacaatacatcactttgctgtaatattctatctactcacctcatcggtattgttccaacagatccgaaaacagtttcatgcatgctagctaagcactctnnnnnnnnnnnnnnnnnnctttccctgagctactgcccttgctttgtttttgatccagggtctcactatgtaacccagattgttttcggacttgctatgtggcctaggttatcctcaacctcacctcctgagtacagggatcacagacatgcaccaccatgcccaaagggagtttcttattgtaataaaatacacaatataggctgggcatattagcacatgactttagttctagcatttgaaaggcagaggcaggtaggtttctgtgagtttgaggccagtctgcatagtgagttccaggacagcaagggctacatatatactctgtctcgaagaaaaacaatacacacaatataaatctaaccatcgcaatcattgtaagtatactgctcagttgtgttacatatccatttctaggccacaatgtattttaccttttaaaaattttatgccctttagtgatggcacacacctttaatcccagcactcaggaggaggcagtggcaggcagatcgctctgagttctaggacagtctgagctagacagagaaaccctgtctcaaaataaataaattttttatttactcattatttatgtatatgtgtgcacctgcatgagtttatgtccaccatatatgttcaggtacccaaggtcagaagagagcatcagatcccctggaaccagagctacaggtggttttgaccaccatgtgggtgctgcaaacctaaaccaggtcctcttcaagagcagtaagcactcttagtccctgaaccatctcttcagctcccacattctatttttattcggagctcttcattttctcctaacaaaagaaaaacactcccagaaagtacagggtacccgcctggaacagtcaactcaggtggcctctttgtcatccctagtacaacaattattatcctcttagaaacatacataaggtttaccaatgatccaactgcctctaaggagaagacaagacccaatactcattcagctcccaatatctcctgacctctttctggtccatgagtactactgaagagacgcagctgccctataggctccaagctataccccaaggacccactgggtatttctgtctcctcctcctcttcagcatcccagtcaataacctgggtgttttccatgacctgtgagggaaacacattatcattgttctggtcattggtttacacacacttgtagagaaaaaataacgagataaccctggaggaacgtggagtgacgtgggggtgattcctgcctgcctttccttccttccttccttctttcttcccagacagggtttctctgctgtcctggaactcactctgtagacaaggctggcctcaaattgacagagatccacctgtgtctgcctcttgagtgctgggattaaaggtgtgcgccaccatgaggtgatgcttttctgtcattctgaagcatgtaaaaatattggggtggggcatggatagtaagaatgtcagtgacagaatgtttggctagcctatgtgaggccatatgttcaacacttagtactatcaatgggaaaaaaacaacttttttgggggccagccagtggtgacacacacctttaaccccagcatttgggaggcagagagaggcagatctctgagttcaaggccagcctgttctacatagtgagttccagggcagccagggctacacagagaaaccctgtctaaaaacaacacacacacacacacacacacacaaaacttttgattaaaagatgttggcatatatctgtaactccagcacctgaaatcccaaggcaggaatattaagagttggagacctggccaggcatggtgggtgacacacgcctttgattatagcacttgggaggcaggagtcagttcaaggccagcctggtgtatgtagtctgttccaagccagccagagctactagttagaccctgtctcaaaagagtggggtatagaaaccacccttggttacagtaagaccttgctccccaaaacaaaacaaaaatattatgtatgtgtatatttatacttttggtcatgacaaagaattaaggtccaagtataccattatatatacattatatacaaaggaatgttacatgggattttaggtactggaaactaaacctagggctcacacatggcaaatgctctaccactgagctatatctccagccccaaaatgggtacttttatttaaagtatataaaagcatgataaactggatcgaggtagtgtatgtccacagttccagctgctgaaggaagctgaagcagtgcaattgcttgagtccaggagttccaggtaagctgggacaacatattaggacctctttataaaaaataataataaaattgcctggccttggtggtgcatgcctttaatcccagcactcaggaggcagaggcaggcggatcgctgagtttgagaccagtctggtctccagagtgagtaccaggatagactccaatgctacacagagaaaccctgtctagaaaaacaaaataataataataataataataatataataaataataataataataaatagcaagttcaagttaagcggttaaagggacggctcagtggttaagataactgccatgttcttcaagaggttcagttcccagaaccctcacagcagttcataactccagttccagaggatctgacaccttccttagaaccaggcctggcccgtgtgtaggcacgggttgctgagaaactgctacatgaaatatactgtcttctaacctctgacacacagatctcagagagctactgaggatcaaactcagggccttgtgcaaactccaggttttgatgttctttttagacagggttcctctgtgtaacagctctggctgtcccggaactcactctgtggatcaggctggcctcgaactcacagagatccacctgtctctgtctcttgagtgctgagattaaaggcatgcgccagcaccacccgggccaaactatttttaatactttgtctaattcatttattcttccgaaaaaccctgtaggtataaactattcttttctttttaggcggagaaactacaacatagatgggctccaagtcaaacttgcctaatgtaactccctggcaagacgctttttttcccctacactccagatggtagcgggggagccgcctctgcatctccccacacccacaaccacgtccgtctcattgacttgacaatgaggaagcgcacctggcacctcaaccaaaataaaccctgctctctctctctctctctctctctctctctctctctctctctnnnnnnnnnnnnnnnnnnnnnnnnnnnnnnnnnnnnnnnnnnnnnnnnnnnnnnnnnnnnnnnnnnnnnnnnnnnnnnnnnnnnnnnnnnnnnnnnnnnnnnnnnnnnnnnnnnnnagcaagcgccgctaacaggcaaagggggtgtggcctgagacgccggctccctgattggctagcaccctggacccacccacccatccaccctccgtcgctacgtcctctgccgcacacttcccgcgccgattttccaaacgccttactatagagtctcgcgccagtcgccggcagtggctagaagggccgtaccatagacgtcgttccgaggccagagcgcccttctcggtcgtcccagaaatggcgctggccggctcaacgtgtaatgaagggtttgcgggctgcagtcgtggctgcgggctgcacactgcagattggaaaggtgcccgtaggcgtggcgctccagaactccccgttgcagagggattccatttgcttctgatttggaaagcttagcaaggaatatgtgtgtgtgtgtgtgtgtgtgtgtgtaaaatgacggacattttgaggtcaccttcctaaatggaagatcctaaataaaacagacgtgggtgggcaaaactgttttactaaaacctcaaaatatctgtcatctttcaaaagatgggaatgagataaagaaaattattatcgtcacaaaacatgaaagcgtagcaaggaaatgggcttggatagtttttaagttctctcccatcggttatctcgttgtgttcacaataaacaaattggcagacgtttgtttgaagctgtaagttggattccttccccatgttcctactgctaacgggacaaattcaagtaacacaaaattgatctctttccttattatcatgacccaaattaattgtgtttttaatgaatgaaggggtattaatgctatttaatgttcctttatttaaaaggtaacttgagctgtgtatggactgaatgtcagcaatgtctttgatacattttctctctgacaaagggtctcactatgtacctctggctggcctagaccaggttagcagtgaactcattgatcctcctgcctgtctgtccacacctctccttcacgacctgatactgcttaccacaccccttcctttgttttctctttcttgaggaggtatttactcatgtgtattagaattttgtctggatgtctgtctctgcactatctgagtgccacatgcctgccgagggcggaagggggtgccgggctccctggaacaggacttacccatagtggaaagccttaaatagtgatgggaatcgaacctggctctttttccgaggacaaatgctcttaattgccgagtcatctctccagccccgtgtgtggtttgttttcaagacaggctctcactttgtagaccaggttagccttcagcgtacaagaatccttctgcctcaaccatcctactgtgtgggaggttggacacaaactaattttccactcatttatttattatttatttattctgaaactgggtctaaagctgtacctcgggctgtacaggaactctcttaagtagcccaattgaccttgtacttcctgagatcttcctgccttggagttacaaagcaggtgttaaccgtgtgaaccacccctgctgactcttagaatcattttgtatccctcttacactttcaggatactcagtttctatcaaatgaaaccctgggaaaagcttctgggctctgactcccatttctcagttcctggactctgccacagcctcccgtaacgaatagaaccaaccaactgaaaacgaccacttggcttccttcacccaagtgtcttgagaagcatcccatttcatcgtctgtattgataggacgaccatggtgtcttcagcgtggtcccaaaggcccaaccccaccccacccccgccgccgaggtttacagctttctctctctctctgaacatcggtcccaagcaacacttctagtctgaaaaatccttgcaattttgtttctctctcgaaacatccttgggacaactcccttaggagccggagggccatcctttcttctggagggatgcgagggagtgctgctcactgaagttactgtcttgggaccacaaagaactagatagtaagatcagggcagggtgccacatttctccggactttccgctgagctatgcagtccgcctttaccagagccactgcggtgggcagcttgcagggcgcgcccatcccatctccaattcagggcacctcagacatcccaattaccgttaagtcccaaaacttcttagagcacaaaaacctctctcaggaacagaggataggaatctcgtgcgaggtcactttccattaaaaataaatacaatcacacccacacgaaaggtacccactaaacctcccacagtatccacccatgcctaacttcatattgcagcgtggacaatagagaactacaactcccaaaaaggactgcgctcgccactggctcacagaccaatggtcggctggcacgtgatcggcggatctaatcagcggcaggctggagaggctttgtcttctaccaggggctcccgcctatctcccgcccccggctgcgcgaacgcgcgccccgccctgcgcgccttccctcctgcgctcgccggcctcttctgcctcttagaaccttcctgcggtcgtgctcgcatctctctgctgcagcctccggagccacgttccatcccttcagcctgagaccagccaagaaaaaaaaaaaaaaaaaaaaaaaaacaannnnnnnnnnnnnnnnnnnaaaaaaaaaaaaaccaattatcttttcttgctcggtacctaccttgaagccagcacaaatttattacagtaaaccgtagccatgagggaaatcgtgcacatccaggccggccaatgtggcaaccagatcggtgctaaggtaagaatttttaaattggtaccggatacgcgtgaggatgagaaatccaggttaatcatgattaatgttaccgggtgttagcattctccctccgccggctttggcccctcaaagttctgcgcgaacaattataacccatatttgtagcttgcgttctgagaaatatttatcttggcacattttccgaaagccattaaaagagacgcctgggtttaggggacggagagtctgaggagggactggagtgcttatctaaaagaggggatttctaacggttcgagaacgggagaggagagatgcggaaacgatccgagacaaagccgaagcgaggttttccccttgcgccacccccacccagcctggagggccttagcggagcaggactggcgggggcaggggagaggttgggcgggcagctgcagaggtctccgggccgcatcaccgctcgacaaaggcttggagaccctcgcgatctcgccatcccctggctcgcttttaggtggatggtgatgattccgtgcggggggctccttttacttcattgccgttaagaaatcttagggtgtgacctgatgggaaagtgagaggtttgtgtgtctataagaggtccctcgggactatgtgtgtgtttgggggaaagctatttagggaagagaaggtagcaaaagcaaaaaaaaaaaaatctgaggccatggttttctcttttttttttgcgcgcaattacaatgtagcgggggatgggtggagaggaggaagtgcggccgctagattgtagccgaagggtgggaccctttgggggcggggctattcttggctggaagagcgccccgccaccgcagtcacgtggaacgcgtaaggggtgggcgactgcagtggccgcaccttcctaccccatccctcttttgtgctggcctggaggggcggtgcccaccctgaagcgcttggctgggtgctgagccgagggggcggatggcagttcagtcagcccatatgggtgcttgcaaccctcagccccttgaactgtccatcacttgaccagggccacaaaggtggcgaccttccccggttggaggttcggtcgtggaggctcggcaggcagataacggaattgcagtatcaacccgtccgcctcgtttgagcacgtctagagttgaaatgcgggcggggaggcatcccttaggacttcagccattgaggcctggctcattgctcattgctctgtctagttctgggaggtgatcagcgatgaacacggcatcgaccccaccggcacctaccatggagacagcgacctgcagctggaccgaatctctgtgtactacaatgaagccacaggtgagggagggaatccagcttcttttttctctgttaacacttatccctggtctttttaaaccctgcgcccttctgttgagacagggtctcgttatgcagccatggctgccctggaacttacctccctaatgctgcttttaaaggcggccgcaccacgccctgttttcccacgttaagtgcctgttaacccggttgctggggtctcacccttttccattagacacccaccataagtgggccaaagattagctctgctgccgccgggtggcagtgcctggaatggcagtttagtggtttgtggtatttcccaccccagatttcatcctcgctgcagagggctctgacagttctacttgaatccctgtaggtggcaagtatgtccctcgggccatattggtggatctagaacccgggaccatggactccgttcgatcaggtccttttggccagatcttcagaccagacaactttgttttcggtgagttacatggaatgaattcctttgtacccaagggcatgattccagaggtgaaaggtgaagattagtaatgataatgacgtaatttttttcccttctcaccacattccaggtcagtctggggcaggcaacaactgggctaagggtcactacacggagggagctgagctggttgactctgtcctggacgtggtgcggaaggaggcagagagctgtgactgcctgcagggcttccagctgacccactcgctgggtggaggtaccggttctggtatgggcaccctgctcatcagcaagatccgagaagaatatcccgaccgaatcatgaataccttcagtgtggtaccctcacccaaagtgtctgacaccgtggtggagccctacaatgccaccctgtctgtccatcagctggtggagaacaccgacgagacctactgcatcgacaacgaggccctgtacgacatctgcttccgcactctcaagctcaccacgccgacctatggggacctcaaccacctcgtctcggccaccatgagcggggtcaccacctgcctccgcttcccaggccagctcaatgccgacctccgcaagttggcggtcaacatggtccccttcccacgtctccacttcttcatgcctggctttgcccctctcaccagccgtgggagccagcagtatcgggccctcactgtgcctgaactcacccagcaggtcttcgatgccaagaatatgatggcagcctgtgacccccgccacggccgatacctcaccgtggctgccgtcttccgtgggcggatgtccatgaaggaggtggacgagcagatgctgaacgtgcagaacaagaacagcagctactttgtagagtggatccccaacaacgtcaagaccgccgtctgcgacatcccaccacgcggcctcaagatggccgtcaccttcattggcaacagcacggccatccaggagctcttcaagcgcatctccgagcagttcacggccatgttccgccggaaggccttcctgcactggtacaccggcgagggcatggacgagatggagttcactgaagccgagagcaacatgaacgacctcgtctccgagtaccagcagtaccaggatgccaccgcggaagaggaagaggatttcggggaggaggcagaagaagaggcctaagccagagagagagagccctgcgtcttctcctcaggctacttagttccctcagctttcttcagctgcccgtttttctccttcagagttttcttttctgctgcctctgtcctgtttttttatttttttccatgggggggtaaacagtgcctggcacatagtaggcgctcaataaatatttgtttgtggaatgtttcctttctctttccactctgacaaacctagatttctgccattctgagtgttgccctgtgtttccttctggtacccatttctcaactgtcagttaatatatttccaatatgttctccaggaacctgcccattactaaaaacccaggtgtagtggtcaccatcctaaagctaagtgggtcagagaaaggtcactagaagagggatggggttttccatcgaggccatttacacagggggatccactgtggctttgtgttttttttttttttttttttttttttttttttctcgacaggtctccccgtccctgcttcatctctcagcctcaggagaggtattaacagtattatctccatttatagcctcccagctgttctgagccaaatctgctattggaggtgtctttcctgagttgttcctttctccatgggttgggggcagagccttagtctcacaaactgccccatccacttaaacctccaaatttggaaaagagtgctgccacctgggtgttaggggccttccccagagggagggcgacttttgcttctgccattttcttcctggtttggtcctaccctacctacccttctattttgtgtttgaacttggctgctttttttcatattgaaaagatgacattgcccccaagagacaaaaataaatgggaattggaaaaaaggtgtgaggtgtgctcattcagggcaggtaaagtggtagaggcatggggcccaggtggagttacacccaagctcatgaggatgtcacaagacctcatcctgaaattctgggtaagcaagtatcctattacccctggtcggtcataccttcattttgactttttatggtgttggggattgagcattgcactgtgcgctaggcactcttccactgagctgcacccctgagttggtcctgcctctgagactgtgtggtttgcccagcaggtttttgcttcattcttgaggtgtgaggtggcccctagctcccattttcaacatagtagatacctccggagcccccaccacacccgagggtttctttagccttggcaatcctggaattcattctgtagaccaggctggccttgaactcaggcagggatgcacctgcctgaacctgccaagtgctgggattagaagtgtgcaccaccattacgtggcttaacctgtgattcttttggctctagttcgtgagctctcagggcctcaggctccttgagttggtctcttgtgttctctgttgacactacagattggagttaccacatgtgcagttgcatcagctttatgatgggtttaatgtataaaaacagtgtttggggcttatgtatgactgctacaccatcttggtatcccaagctgtcagcttgactgcaggagccacgcccagtatgcccacttctggatgaaacttgtgattcttctgctcctgcttatggcatgtcacaaacttcatctcttggtttatttatttaactagggccaccttttggccttggtgaggaggaagtctagataacaggttcacacagtctaatttaatcaggaaattaaatagtcgggatgggatcatcagaatctggtgtaggggtgagaagggagcaaactgctccaaggcaaggcacagaatatttggcaaggagttacagtgtgcccctctgtccggaggcatgctcagggaggccaggagaggtgcatgcaacgagccacagggccaggtcccgccgggggttcatgctgtcctcaaaggcttgttgtggttcacctagagagagaaatgatgacatgggaactctgccctctccagcaaccgcttggaaggatgggttcaggaaggcacagaaaaggccaacaatcttctaggctaggtggcacacactcaggaggcggaggcagggggatctctgtgagtttgaggctggcctggttacagagtgagttccaggacagccagggctacacagagaaaccctatccatgtttaaaaaaaaaagcaacaaaaacacgccccctagatggggtctcactatgtggacccagatggcctcaaactcacagatcagcctgcttcggccccgtgtgctgagattaaaggtttatatcactacacccagccacactttatttatttatttatttatttatttatttatttattggtttttcaagacagggtttctctgtggctttggagcctgtcctggagctcactctgaagaccaggctggcctcaaactcacagagaccctgcctttgcctcctctgtgctgggattaaagcctgcatcaccagcgctgggcctggaggtggttcttttgtgtgtgcacttgtgtgtgaaaggcaaagaataactttggttgttcctcaagcactgttgacaattttgtttttagggtctctcactggcctagaacttgccaagcaagaacctgacctgggttctgggaattgaacttgggtcctcagcagggtgacctgggcactggcaaagcactgtctgtgacttcctgggctcctggaagcacttatccactgtatcccataacacaggtgcaccgtcccccctccccgtcccgtccccccccccagcattgaccctcacctgggagatgctgacgcccgtgagtctctccacactctctggcaggcggcttaggatgtccagtacttccccagtcactttggcggcccccatggttccacttccgctggacaccagtgtgatcttattggctgaggtcaggggaccgctgatctcttctgccacctgggaggtagagagagctctgaccatatcacccatcagattcaccctactactgaccataaactgctcaagctggtcactggcttatagttggcactcttaatttatggtcccccagtcacctacttcacctcacccctctcccagagtcccacccacccccagacctggggcagtttctctagcagcatgtccagctgggcggcctcctggtacatctggaaggcttctgccttcttagccatttgctcagcttcagcacgagcgcgggcccctatggcgaaggcctcggcttccccacgcatctgtagaggttacagggcatttaagactgcacccattaagaataagaacaccaaaacagaaggcagaggtggttcacgcctttgatcccagcagaggcagaggcagaactcacagatctctttgagttctaagccagcctggtctacagagtgagttccaggacaggctccaaagctacagagaaaccctatctccaaaaatcaaaaccaaaaccaaaccaaccccccccccaaaaaaaaaaaacccaaaacgaaattctgaggccaatgagatgcctgagatggtaaagtgcttgctggcaaggccaacaacctaagtcaaaattcccaggactcacatgtgaggaagagatccgaccttcacactggcaggatagtacatgcaccatcatgccccccacgttaaaagaaaaacaaaaacaaaaaaccgacaacaaaaaacagctggggggcagttgtacatgcctttaatcccagaatttgggaggcagaggagggaggatctccgtgagtctgaacccagcctgctgtttaaacaacaacaaacccaagcccttcccggtgccaagctgggcgcacgccccaactcaccctcacagactcagcctcggcctctgcctgcatgatcagctgggccctggggacgaaagggaagtaggttcgctgcctgccgggcgggtgcctggcctgcctaggagtgtcccggggccaggaggggggcggggagggggcgttacttttctgcctccgccaggcgctccagtctgtagcgctcagcctcggcaggcttgcgcacgcgggccagggctctgacagttctacttgaatccctgtaggtggcaagtatgttgccacctgctgggcgcgttccaccacctgcacctgcacccgctgctcctcgatctgctgcttggtcttggccacctggagagcaagggacactctagacagggcttgggagcagatgctcccccaccccggagccagagagaaaagccagcaagcactacggtgtggaagaggcccatgaagtcgcttcctggtctgctcagcctactgggtagtgggatccatttcaaggacagaatcaaggcagaacctgggagcggcctcacgactcctcagagcaggttcaggccttagcaggtacctgctctcccctgggtggggcgaagcatctcgcccaggtcttcacttgggtatttgtgtccctggtggtcatcttctacctccacagtccacttccctttgcaagccgttcttagggtaaaccaccaactccagccctgacctctcagtagccagtactgccttttctaccctgccagcggatacttttttttttctttccattttcatcttttgcataccaaataaattcaaaagaaaaagccggtatggaaaacgcggcttcctcccacctcttgcctcaaaccgcttggttcccttcctagaagcaaccgctatggccagttttcagactgtgtgtgtatgctcagatttctcttttccaccgtcaacattgttgttattattttggtttttcaagagatggtttctctgcgtcgtagccctagctatcctggaactcaatctgtagaccacattggtcttaaactcagctagcctagtgctggaattaaaagcatgtgccaccaccaatctcttaaagacacacacacacacacacacatatatatattccatctcatgaactacagttacagatggttgtgagctcccattcgggtcctgggaattaaactgaggacctttggaagaacagcagtgatctcaaccactaagccatttctacagctgttttttttttttttttttttttttttttttttttttttttttgtttttgttgtttgtttttttaacataaaatattgtccctctgtattccaggtaaccttaaaagtacatagcatggggctggagagatggctcagaggttaagagcactgactgctcttccagaggtcctgagttcaattcccagcaaccacatggtgggtcacaaccatctgtaatgagatctggtgccctcttctggtgtgcagatatacatggaagcagaatgttgtatacataataaataaataaaatctttaaaaaaaaaaagtacatagcacatatctttttttatcccagcacttggaaggaagaggcaggcagatctctgtgagtttgaggccagcctagtctacaaagctacacagacaaaccctgtcttgaaaaaaaaaaaaaaagtacatagcccaagctaggctcatgcttgatgtgatcttggattagcaagatgactttgatcctgggggaaccacgtggtaggagaggggctggctcttgcaggctgtcactcacctgaacacacataaatggaattaaataatgtggggtggtggagagacagatcggcagttaaaagcactgactgtgtttgcaaaggaccggtgttcatcacctagcatctacctggcatcttatgaccatctgtaactccagctccgggggatgtgacaccctcttctggcctccacaaataccaggcaccagcacatgaacatagtacacatacaaacacgtaggggaaacactcatcacataaaataaacacataatataaaaatgatgatgtggtggattttggagagccccctttgagggccctaccctgcctggggagtggagggtggatggggtgggggtagtaggttgggggagggtgatgggagtgaggggagagagagggagagggagaagggattgacatgtgaaaccagcttgttcctaatttgaaataataaaaataaacacataatataaaaataaataaatacatattctttcttcgtttttgtttttgtttttggagacagggttctctgtggctttggaggctgtcctggaactatcacttgtagaccaggctggtctcaaactcacagagatctgcctgcctctgcctcccgagtgttgggattaaaggtgtgctggacatggtgctgatgacatggggtagaactgtttgcagcctgagagctaaaacaaggtagccctttccttatctcatctcatctggagactccatcagacaactagagtttctcagcattctgtgtctgcccaggctttacacaaatgctgcaagttctgacctagggctcacccactaatcccagtgagcaggcagattcgccaatgtgcaacccatgactggcagggaccagctaagcctccctgtaacgtaaagggctgctcggagatcactgtccatatttcaaggcccacgtccgtttccttcctcacccttttctttgattgccacagttttggggtaccttgtgcaagcgaaaaaaaaggttctcttcttctgaataggtgcagactcttacccagaacacttcctggcagtgagcactgggtggctcttcactctggttcctctctgcagccagaggcccttacagacaggcacagcctagccaatttatggcctctctttctttccatcctcttctctctctctctctctctctctctctctctctctctctctcctttttgatttttgagacagggtttctctgacagcagctctggctgtactagaactcactctgtagaccaggttggccttgaactcacagagatccacctgcctcttcctcccaagttctgggactaatggagtgcaacaccaacacctggctcgttctttctttttttggggggggaggttttcagctaaatgctccagtctatatgcatgtgcagatcacacgcatgtacaggtgtgcaggccggaggacaatttaacactgccacgcctcttcaggcaccatctaccttaccttctgagacaaggcccctcactggcctggcattcaatgattgtgctagccctgctgaccagtgatcccccaagatccagtatggggatcacacgtgtgtgccacccagcaagtttatcaaccgagctacctctccagtctctgctccagactgttacctctttttttagattggggagatgggttagcattggggaactagagtctgagcaaagatagaagtctctcctaatttacagatggaagggagaaaggagagggaccaccgaacagcctagacaagccccgtgtggctgcacttacttacctgcagctgataggccaggtccgcctgtgctcggcgagtgttgacctcgatgtcataggtagccttcttcagctcatagtctctctgtgccttggccatctctatttcacttagacactgcgcagataccttctcctgcttggccttggcctcctaggacagattagtgagggaggccaaggcgtaagggcctgcttgctctctgccagaagtctctattgtcacccctgatgacacagtctggccaaccactcagctggaccctccaaacccccttgtgtcctggggtgtctagcaagtcagtggtgaccaaacaacacccatcgccctcacccgtatcccggcatctcttttggcctctgcttccccaatccgagcatctttttggacttgcgctgtgcgagccttccccaaagagtgcaaatagtcctgtgggagagtgagaccaaggtttgagaaatggggccaggctttttgtttgttttgtggtgcaggggttgaagcagagcccccagcacacggggctaggtgagtgaactaaacttgttctttgtttccccagacagggtctctctgttatgtagctctggctgtcttggaacttgacttatagaccagactggccttcaccaattcacagagacccacctgcctctgattcccaagtgcaggattaaaggcgtgtgctgccatcacaggctgtttgtttttgagacagagtcacactttgtagcccaggctgctctggaactggaatggaactcactttgtagcctagataacctatggatccttcttgctttagtccccccaccctatccccagtgctgggattacaccaagcctgcccaactgcatagttttacctggtcatcatgaatgtccttcaaggtgtagctaaccacactgatacccatgttgaccaggtctgaggaggccactttgaaaacttgctctgagaatttctgtctgtccttatagatctcctagagagaacagtgaggagaggtcagattcatcatctcttaccgacaagccggtcctcaggtgccactcatcctggcaccctacccagaactgttcttgtcccccagtcacacctccacagtcatatgggccatgatggccctctggtggccctccagtgtttccagggcaatgtgggcaatctccgcctcggtcttccccaggaacatctggcaggcggctgccaacatctccttgttctggccctggattttcacctgcagccatagtagagagaagaggaagagctaggtgcccttgggggtggctggagaaggtgaggccagaggaaaggcagagtcgagagaaatccctggtcagaggtactcaatggcctggaaaaggtgggtgtgggctttgggggagaaggctctgaaagcctcacctgggcaatgcccgtgactgagatggggaccccatggcgggtataaaccttttcactcttgacattgagggtcagtgtgttgagagagatcctagggagagaagaagcagcagagaggaaaataggctccctccggggttctgtgggttacctacctctggatttgttggatgcagggcaggacaaaaactcggcctccggccaccatgactggggggctcctgcagaaccctgaaaggtgagggcataatgtggccgtggtagagcccaaaagactatggggtgaagggtggaacacacaaggagaacctggtgggagttgagggcgagcattctaggccttggaaaatagaggcagggaatcacaggtggtttgtggccaccgtgggcagaaggttggggctggtaaactaagtgaggagagaacagggcagaggtcaggcttcaaggggcttggggaggggaggagcgggtgtcactggctttgaagagacttaccggagaccaccatggcctcatttgggccacaagtgaaaaacatggttgaggctgcagctggagggggatggagaggaagcctttgcagaggggaaggggccttgtggcacctcctcccccttcgcgtcaagagaaccgtctgcccctgccaccgcccagttccttaagtgctcccgtgatagccctaagatccccagggacttcttcctctgcgcctgctgattctcagggtcttctcccgcgccctccagcccctccatcccacaaagctctcccgcgcccaggggtctgcagaccgttccgcatcctccccgctcctccgccgcccaaggctccgcctcccctccccactcaccttccgggacgcggggagcaaccctacgggggtcttgggagccgcgcagagccctagtgagaagcaggggcagctcggacacccggcttactggaagctgcgagggtgccccnnnnnnnnnnnnnnnnaggccccgcccgggtccgcagcgctccagctctcggcagtcccgggggcttgccaggcttgcccgctagccccggccgggaagctccgcccccgcccccgagaccacgccctcccaggctggtcgctgggtgcccgccgtccgcggtgagtaagcaggttgccacactagcagccaactggcaaaaccgcagacccagtaatgtatgacagcatccggtgaccggatgtaggttgtaactccaagaaaaagagttcgggacccaagaagaggtgctgaccgggaactagtcacatcctcccgccgccaccatcaccatcctcaccccccctttttttggccgcgtgaaaagatacacttggacaaatgatgatagtaataaccggcaatcaagtttattcgtgttcacagaacatactaaggcgacccccaacagccgccctctgacaatccgtggacccaagactcccgcagcctctcctgagaagcaaccaggaagacatcaaaggccacagaccggatcccccaagggtgtcccgaaagccttacaacagactacagaagtgaggggctggaagacggagtgttgcccctaaacccatgaccaaccaccaagtctaatccccaccccggccctccctcccaccgctctgtctcaccgaacccataaatcattaataaataatccagatgtcagtgttacggcaagggggcatatcccgcacccctgcataagttaaaataaatattacatacaccccctccttcacctaggaggttatacataaatatataaatattaattaggacgctgagaaggcttcggtccttcccagtaggcctcgccaggacccacggtgcctgcgagctcgggctcgcctcaagcaccggcgtcttggctgtagtgttgtgagttagcatcgccttataagtcccagtttgggatacgctctggcgcaccagatacgcctggtgcctttgttgtttttttccgggccaggtgtgaccgggcgcattcagaaggccgcggggtgttgctgaaggaaagctttgaggtccagagcatagtccgaggactccgaggtcagattcaagggctcgaggaccgggggctcagtcatgagcgcagagagggtttcaggtgtcgcggcgctggtggcgtcctccggagccagggtctgcgacacaccttcctcggccatcaagatctggcagaagacgatggtgagcaggagaaagaggaccctcttggcaacgttgggttcctcggttggcagctggcgccggacctgggaagagataaaagagggttaagtcggatcagggtccccgccgtctggtgtcccccgtaggtacccgagcggcgcgagcccctgctgcccactccggcgacactcaccactcgagggtagagaacccttcggctgcgttttcggtgcccgcgggaagtgtggagacgcgcggcaggcgccaccgcccgctccgggagagggtcgaaggtgaaaatctcgggaccggagccccgccggagttccgagccggtggagggagcgggggccggggctggcaggnnnnnnnnnnnnnnnnnnnnnnnnnnnnnnnnnnnnnnnnnnnnnnnnnnnnnnnnnnnnnnnnnnnnnnnnnnnnnnnnnnnnnnnnnnnnnnnnnnnnnnnnnnnnnnnnnnnnnnnnnnnnnnnnnnnnnnnnnnnnnnnnnnnnnnnnnnnnnnnnnnnnnnnnnnnnnnnnnnnnnnnnnnnnnnnnnnnnnnnnnnnnnnnnnnnnnnnnnnnnnnnnnnnnnnnnnnnnnnnnnnnnnnnnnnnnnnnnnnnnnnnnnnnnnnnnnnnnnnnnnnnnnnnnnnnnnnnnnnnnnnnnnnnnnnnnnnnnnnnnnnnnnnnnnnnnnnnnnnnnnnnnnnnnnnnnnnnnnnnnnnnnnnnnnnnnnnnnnnnnnnnnnnnnnnnnnnnnnnnnnnnnnnnnnnnnnnnnnnnnnnnnnnnnnnnnnnnnnnnnnnnnnnnnnnnnnnnnnnnnnnnnnnnnnnnnnnnnnnnnnnnnnnnnnnnnnnnnnnnnnnnnnnnnnnnnnnnnnnnnnnnnnnnnnnnnnnnnnnnnnnnnnnnnnnnnnnnnnnnnnnnnnnnnnnnnnnnnnnnnnnnnnnnnnnnnnnnnnnnnnnnnnnnnnnnnnnnnnnnnnnnnnnnnnnnnnnnnnnnnnnnnnnnnnnnnnnnnnnnnnnnnnnnnnnnnnnnnnnnnnnnnnnnnnnnnnnnnnnnnnnnnnnnnnnnnnnnnnnnnnnnnnnnnnnnnnnnnnnnnnnnnnnnnnnnnnnnnnnnnnnnnnnnnnnnnnnnnnnnnnnnnnnnnnnnnnnnnnnnnnnnnnnnnnnnnnnnnnnnnnnnnnnnnnnnnnnnnnnnnnnnnnnnnnnnnnnnnnnnnnnnnnnnnnnnnnnnnnnnnnnnnnnnnnnnnnnnnnnnnnnnnnnnnnnnnnnnnnnnnnnnnnnnnnnnnnnnnnnnnnnnnnnnnnnnnnnnnnnnnnnnnnnnnnnnnnnnnnnnnnnnnnnnnnnnnnnnnnnnnnnnnnnnnnnnnnnnnnnnnnnnnnnnnnnnnnnnnnnnnnnnnnnnnnnnnnnnnnnnnnnnnnnnnnnnnnnnnnnnnnnnnnnnnnnnnnnnnnnnnnnnnnnnnnnnnnnnnnnnnnnnnnnnnnnnnnnnnnnnnnnnnnnnnnnnnnnnnnnnnnnnnnnnnnnnnnnnnnnnnnnnnnnnnnnnnnnnnnnnnnnnnnnnnnnnnnnnnnnnnnnnnnnnnnnnnnnnnnnnnnnnnnnnnnnnnnnnnnnnnnnnnnnnnnnnnnnnnnnnnnnnnnnnnnnnnnnnnnnnnnnnnnnnnnnnnnnnnnnnnnnnnnnnnnnnnnnnnnnnnnnnnnnnnnnnnnnnnnnnnnnnnnnnnnnnnnnnnnnnnnnnnnnnnnnnnnnnnnnnnnnnnnnnnnnnnnnnnnnnnnnnnnnnnnnnnnnnnnnnnnnnnnnnnnnnnnnnnnnnnnnnnnnnnnnnnnnnnnnnnnnnnnnnnnnnnnnnnnnnnnnnnnnnnnnnnnnnnnnnnnnnnnnnnnnnnnnnnnnnnnnnnnnnnnnnnnnnnnnnnnnnnnnnnnnnnnnnnnnnnnnnnnnnnnnnnnnnnnnnnnnnnnnnnnnnnnnnnnnnnnnnnnnnnnnnnnnnnnnnnnnnnnnnnnnnnnnnnnnnnnnnnnnnnnnnnnnnnnnnnnnnnnnnnnnnnnnnnnnnnnnnnnnnnnnnnnnnnnnnnnnnnnnnnnnnnnnnnnnnnnnnnnnnnnnnnnnnnnnnnnnnnnnnnnnnnnnnnnnnnnnnnnnnnnnnnnnnnnnnnnnnnnnnnnnnnnnnnnnnnnnnnnnnnnnnnnnnnnnnnnnnnnnnnnnnnnnnnnnnnnnnnnnnnnnnnnnnnnnnnnnnnnnnnnnnnnnnnnnnnnnnnnnnnnnnnnnnnnnnnnnnnnnnnnnnnnnnnnnnnnnnnnnnnnnnnnnnnnnnnnnnnnnnnnnnnnnnnnnnnnnnnnnnnnnnnnnnnnnnnnnnnnnnnnnnnnnnnnnnnnnnnnnnnnnnnnnnnnnnnnnnnnnnnnnnnnnnnnnnnnnnnnnnnnnnnnnnnnnnnnnnnnnnnnnnnnnnnnnnnnnnnnnnnnnnnnnnnnnnnnnnnnnnnnnnnnnnnnnnnnnnnnnnnnnnnnnnnnnnnnnnnnnnnnnnnnnnnnnnnnnnnnnnnnnnnnnnnnnnnnnnnnnnnnnnnnnnnnnnnnnnnnnnnnnnnnnnnnnnnnnnnnnnnnnnnnnnnnnnnnnnnnnnnnnnnnnnnnnnnnnnnnnnnnnnnnnnnnnnnnnnnnnnnnnnnnnnnnnnnnnnnnnnnnnnnnnnnnnnnnnnnnnnnnnnnnnnnnnnnnnnnnnnnnnnnnnnnnnnnnnnnnnnnnnnnnnnnnnnnnnnnnnnnnnnnnnnnnnnnnnnnnnnnnnnnnnnnnnnnnnnnnnnnnnnnnnnnnnnnnnnnnnnnnnnnnnnnnnnnnnnnnnnnnnnngacgcgcggcaggcgccaccgcccgctccgggagaggggcgaaggggaaaatctcgggaccggagccccgccggagttccgagccggtggagggagcgggggccggggctggcaggccagtcatggtgtggacgtggttgcgcgagtggcacatagtttgagcgcagtgcagagagggtgaggagcgttgctgatggcccagcgaggcggcgctagttatatagtcaaagcagaggacggcccgcggaactccgcccttcgcagctggggagcagttggctgcaaagggctggaaattccgaggaggaaacaaaacgtaggcggggccttggctgcctaatccctagatgtcccagtgcacgttttgcctgggagtagtaatgccggtgggtgcaatcgctgggggttagcacatgtccggacatgaggtggctagcggggggctcccagacatgtaacacatggctcagccaccatcctgagagaggcccagcaagatcaagggaccgcagaaaaacacattcgcatacttggaagtatgcgtagaaaacacacgtgtcagaagggaagtcattgcacaaacttccaagaagactaagaccacactgaaacccactgacccagctctgcttgcctcagcacacatgaagatgaacacacacatcacatgtatttcacatacacacacagcaaggtgcaatggccacctaggggcaccccaagcgaagctatgcgaagagggatacagcagagacaagaagtcagtagcccctgttggatgggactataagagcgagttccaggacagcttccaaacccacagagaaatcctgccttgaaaaacaaaaacaaaaagaaacaaaaaaagaagtaaaaagaagaaccttctaaaattatgagacattttatcaccattcagaaccgacaggaattctgcgctgctttggagacctctctctcttcctggacatagacatcaatgtttctgagcacctgtaacaaagtaaaagtgtgggagccaccctgcacaatatgaaactgcagccctctccctatgcttgccaagctgaggcaggaggatgtcctgaaccaaggagtttggggtcagacaagggaacatagcaagatacacttgcaaagcaaaaacagacaaaaaaaacaaaaaaacaaaaaaaacaaagaaggaactggagagatggctcggttgttaagatcacttgtcacttttacagaggacctaggatcaatcagttcccagaactcaaatgattgctcacaagtaggctcaggggatctgatgccattttatggtctctgtggggcaccaggcatgcatggagtacacatacatgcatgcagacaaaacactcataaaataaaagtgaagcgtatcataaaataaaaccaaaccaaaaaagccaggtgagatggctaagggggtaaaggcgtttgttgctaagtctgatgacccggatttgatccctggatccacttggtagaagagaaccgattcttagaaagtctccttctgacttccacatgtggtctgcatataaccacacatacacacatcggaataagtaaccaaattatatacaaatacatatgcactgttgaacgctctgaggttaggtttataggagggaagcaaaccacatagagctgtgactttggtctggaaggtttaatcccctgagtttacaaggggaccccgattagaacccttctgaggggaccctgaggagtcagtgttcgttcacttctgactaatctttcagggacacttcagtcaagagtgacactaggtgagatatgacacattctgatgtgaagggtgactgggggaaaaatggagtcagcagaggctcagagctggaaaagtacaggattcctttggagggatcacaaggaaagcaatgtcacagtaagtttcccgggaagcacaaaaggcgggtgaggaactgggcagagagagccccagatcacagagcacacaggataattgcaatctaacctgagaactgactgggatggggaccatgccctcaagggcaagaatatgagggaccatgagctactgagggggttagggagaaggtaacagcagcctaaaataagtccagaagagtcaggcggtggaggcacacgcctttaatcccagtactcgggaggcagagacaggtggatctctgtgagttcgagaccagcctggtctacaagagctagttccaggacaggctccaaagccacagagaaatcctgtcttgaaaaaccaagaaaaaaaaaagaccagaagagacatccctagcacgagatcatcagatttgggtaaggacacttaggggccttaaaacagaatggctccagaggcctgaggtgtacttggctcagaactttatctcatcttgagcctgttgagtattcgagacttccatcattcagccagaacctgtgggacacgcacctggtcctgcatagaacccagcacagtttcttgcaggaagcacttgctcaatgatcctttaaaaaacatatatatccgaatgtatgtttgtgcaatccacacatgtaagagccaaaagagccagaagaggggtgctggaacgcctggaactgcagtcacgggtggttataggctgcctgttatgggtgccaggaactacatccttctgaaagagcaataaacggaacctcccctctagcccctcaataattttattaagcaaagatgaaaatatggaactataatattctccagctggttagggcctccaagcttctgggacatgaatacacttctttaaacttcccagagaaacaatatcttagaaaaagctgggcagctggagagatggctaagggagtttctgttcttgccaggacctggctttgaccagcatccacatggtggctcatagccatctctaatagtgtcttttgatctcctttggagccagatatgcgtatgggtgcacagacatccacgaaggccaaacacacacatacaataaaaatgaataatttttttgtttttttgttttttttttgtttttcgaggcagggtttctctgtggctttgggggctgtcctggaactagctcttgtagaccaggctggtctcaaactcacagagatccacatgcctctgcctctggagtgctgggattaaaggtgtgaaccaccaatgcccgtcttaattgaaaaaattttttaaaaagaaaagctggaacttttttttaaactaacaaaactgggaacagaaaatggggcctcctgtgtttatctgtttgtttgtttatttggtttttcaagacagagtttctctgcgtaggcctggctgtccagatctcactctgtagatcaggctggccttaaactcacagagatccacctgcctctgtcttctgagtgctgggattaaagccagacaccacggttgcctctggctcaacctggaagttttaaaaattattactaagtttatctgggggcagggggtgtgggtcaaaggacaactctcgggagtcagttctgtcccttccttccaccacatagtctccttggtttgaactcaggttgtcaggcttaacagcaagccccctttcctactgagccatcttgtcagccctagaacagcttttagacaccagacatcaaacaaagatgggcagtttttttttttttttcaaccaaggatgctcagtaaagcaaatcagcctcacacttgtgctaggaatagaggtctcactgctgtgtatacgactatttcctgggctggtgagcaccacctaaacacagcttcctccttacacacacacctcttcttgtaggcataaacaaatgtcctctttctcatatctgccagcattcccatgtttgcacctgagctgaggctatttcacactcttcctcccaacctaactcacacatgggggaggacggtgctgaggatggaaggaaactggtgggagagaggggaggcccccaaagttgggaatgcataacttgtttgtgatggaaaatttcctcaggccttcagggaaaataaaagagagacctcaggttcaggtttcaacactaagccccacatctgggatcctagctgcagctgggcctagttagcctcattgtcctcctccccacacagggacgaagagatgacccagagaacccagattgttgccattttttttttctcattctcaccccattttccaccatctctggagacacagccacccannnnnnnnnnnnnnnnnnnnnnnnnnnnnnnnnnnnnnnnnnnnnnnggggtgtgggagtgggggctgggtgatgagttacagccaggaagtaccagaggttgcgagcatgagctggatcagagcccagtgttctcatcccagagaaacaggcccggagctgctccaaccccccatccacattccccctctcccggatccgcctgttccttcatttccttcctctgaccaggtattgtgacgcctaccatcacctctttctcagcctcttgtttgtctacttcatagtagctggaaaaatcatagtttcgtgtattttttttttaacctttttagtaatttcttttggtgctggaggttgaacccagaaccacttgaacgcttaccacgtgctctttctccgacctacacaccaaggctgggtctaatctaatcttcagaggagtgtacatgtcccatctgctctttacctctgggggacctctaggtatcctcggtaggtggtctggtgcctggttggggttcaatacaaagttttagctttgaaaaaaaaaaaaaccctaaaaaagtgaaaaacttgttttgtgtgtatggatgttgtgtgtgtatggacgttttgcctgtatgtatgtctgtacactgaaagacccctgccccttagccctttctttctcgtttgtctcctcttcctcctgtcggcgggttccccgatccccccccccggcggcttccacttccccctggttcattcctaggtgtttagttctttttgatgtcactgtaaatgggattcctcaaattttcttttttgaatagttcattgttactgcatggaagcacaactggtttttgtgtttcaatttttttttgtgcagtcagtgccctcggaggcagtaaagagggttggatccactggggttagaattacagaaggctgtgagctgctgtggctctaacgaggatcttaggaagagcagctagtgctcttacccgtggagccattgttccagcccctcaatacatagctttagatctatctcttccaaggagctaacggtcatcccagtgtttgtgtttgcccagctctatcccctcagagccttgcctgcgcttcctcttcaaagtgtggagaatgctaagctgtggcccaggtttattgacacacacccccctctgcagacgaggaagcccctgccttctcctcctcctcctaggactaggccagggctgctgtccacctgcagtgctacaatgttgctaacggaaagccaagggcctggggaatgggggctgcagactgacttaggaagggcagatatttgaaaagtgcatgcctctgagatagagaagcaggatggaagggcgcagccagaagttggggggctgagaacaacaaccaaagtctcctagctgcaaggcatgtgagtatgtcgctggctgagacaagtttgaggtggaaaccaagggaggcaaagggaacatattataaactagtggcattgaggaaatcccgcttaatgtccatttctgttatttattagccatacgacactgagtcagttactctttgaaagcccgtttcctcaattggcaagtgggctggctggcctttaagttattcagagattaaatgctcaggcatttaatcatgtaatcatcaagttacaagacaataaacacctgctttcgctcacattcgcaatctagatcataaaacaaaaagcaacgaaaggagaaacagggaatttgtggagagaatgagaggcagtgagaagacaaccctccaggttcggggtgggttggctctgagcaaagcatacggttgatacaatgccataatgaaacaaaacccttcatttcaacaatgaatgaacacggacttaaaaataaccaaggggctggctcagtggttaagtgcgtttgctgctcctccgggggggctccagcactcacaacagcctacatatccagctccagtcaagcttctgaccttcgagcacaccagcactcatgtgcaaacacaccctcatccccacacatacagacacatgattaaaataaaataaatctcaggaaaaaaaatgagtgtgctgacacatgccttttaattgtcaggtgctctctgtgagtttggaaccaccagcctgttcacatagcaaattcctggacagccgggactacatagagagacccagacgcaaaagcaaaaactaaaattaaataaaaaggacagaggaaggaggagagtgaccctctacctcctcccactcaaagaaagagccaaaaagtagtaaataaacaaatagatgcctaagacaggttcctggcctgcagtccatacttgggcagcagccattattgttgagtctggatgcaggaggttctctggagcacnnnnnnnnnntgccccccccccccccgtaggaaagcagcctcccaatgataagatgaggaggtgtaatctgcagttcagttcctcttccattccctttgcctgtctatctggggcctttgtggttctctgtttatcacagagaaaggagaggccttctgcactccggcttcttcagtcaatgcaagtgattttacacactcacccttgctcccagctggccctacgcacacccagttcagcaaggaacaattctggctgcaggcataggctcgttgatgggagtagaacactttgtgtgtcttagacagttaataaatgacccctgaattgattgtttagctgcgatcaggtcctggcgatttcctgtgacgcaaaagcaaagcgaatgtgcctggagcactcaggcaagcggcagaagtaacagggccacctgccctgtgatatggctccgtctggcccggcccagctctgcccagcttggcccagctgcattaaaggtgatctagagtccgcagagatcagggaactggggaagcacgccatacccctgttcttccaccaagacaggcttttttttaccagctttcaggacccaggtattagctcttcccttttggccctccgtttccttctagcgagattgtaatttttgtttgttggtttggtttggtttggcttggtttctcaagacagggtttctctgtgtagttctggctgtcctggaactcgctgtgtagaacaggctgaccttgaactcacagagatccgccagcctctgcttttcggagtgctgggattaaaggcgtgcaccaccaccacccaacaccagattataattctatgcgggctgattttgtctacttgttggctgctgtttccaattcccaggacccaagtagtggaaggacacacacacacacacacacacacacttgaaaaaaaaaaaaaaaaaaaaaaaaaaatctggctcaatcccacagtccccggctatgaactctctgtgtgtctggcaggcatgcactaccatgcccagtttttggggtactggactttgaacacagggcctcctgtgtgccagacaagcacttgaccaactgagctacgaggcccgatccacctttctgacacagatcttgctttgtagctccaggtgacttccttccagttcttctccatctcagtgatgaggccaaagagtgatgcctctcactctcccccgccctgcctgcacctccctcccgagagctggctttcaatctcctccttttcccccctccccccagcctgtgcttcaacccagggtcttgcactttacccagtgagtgcaagctctagaactgggtatgttgatcaacagaggctgagtggaaagattgagagacaccgggttctttcttttggggggggttggtttttcgagacagggtttctctgtgtagctttgtagcctatcctggcactcgctctggagaccaggctggcctcgaactcacagagatccacctgcctctgcctcccgagtgctgggactaaagtcatgcgccacccccccctggtgacacggggttctttatgttggtacagatttgaccatatgggagtcagcctgcagctcccttcgctacttcagtgtcagcaagtggagagtgtgactgaacccagggccacctgattgctaagccagcactctaccaactcagctacaattcccacacacacctttttgacccaggttcaaaatataatcagagggggaaaggtacagtggataaagttgtctcttgttgtctggcaccccatatttactgaaggccctccagtgggacttctacttccaaagcaccatgattcagcagcatctctcacaaatccccgaaagtcagacgcgcctccctcccctttttacagcagctgccacaggcccgtttctttaaaggttgggagagaatgtcccctcccagagaggcctcagggccagaggtggtgctcaataaaggctggccagatgccacccgggatcgcgtgttaggacgggcttgatctgctgccaagggtgagccctgcggtggttttctgggaagagtagatgccatgtgactcagaaccaagttagggaaaaaacaacctcactaagtccctggcaccatgccgccccagtatggctttgactgtgacctcatgaaagaggaagctgggcctggcagactggatggagctttgctttctcttcaagtttttctctctgctgtctcatagattccctagagcgtctgggtcctaagctgccgtcatcctggtgactcccgagcagttctggcacaacaccgatggctttccctgtctcagacaatgaaggagttggaaatcccacccagaacagtgggaggatggctcacaaggggaacgtgagggataacacgcatctcttctcctggtcagcatcaaactccctctctggatagcgcctgcccatttggagttgttnnnnnnnnnnnnnnnnnnnnnnnnnnnnnnnnnnnnnnnnnnnnnnnnnnnncagaagtggttgtgtggctacattccccagttcagaaaggaaaacagggactcccacattcccgggcagttgagccaccctcagcttggaccagcttagctagtgattttggtattcattaactattcaccaccagaaacaaagacagtgatgggccacaaagaaccttccaaaagccaggtgttgtcactggtgctggctgtaggctgggacttccactgtcacggctgggttcagtttgggatcaggtaatatggtttggggatgaaggcgtggctcagtggctggagggcttgctgagcatggttgaggcctgaggtttgatcctgccctcaaaaaccagactctgtggcacaagcctattatcttggcctctggatgtggaaaagtatcaggaggccaaggtcatatctatctatctatctatctatctatctatctatctatctatctatctatctatctatctgtctatctatggagtttgaagtctggtagccttcccaagaccctggctcaagaaagcaaaagcaaaagctaagtgtggtggtatggttgtaatcccatcacttggtaggctgaggcagggagctcattctgagttctagaccaacctgatccaagtacaaagccttaggccagtcaggatgccctagcaagacattgcctcaaaaaccaaactgatggcagaagcgatgtctcagtgcccaaaggtgctgccccgaagcctgaaaacctgattgcatacccaggtctcacgtggtgggaggagagaatcaatcctgtgaagttgttctcttccctcctcctctccatcgtgcatgcacctgtacacatgcacactaaataaataaacgcacagtaataatttttaagaaacttttgggccatcgagatggctcagagggtaaaagatcttgctgccaaacccaccacaaccctcatggtagaagaagagaactgactcccataagttaaataattggatgttttctttttccttttctctcttgtgctatttttgtcttaaaagctttttaaaaaagttttacacaggcacaagtggcacacgcctttaatgccagcagttgggaggcagaggcaggcagatctctgtgagtttaaggatagcctagtctacagagtgaactccaggacagccaggattgttacacagagaagccctgtctcagaacaaacaaactacaaagatttaattattgtatgtgtctgaatgttctgccagcatgtgtaccatgttcatgtctggtacccgcataggttaaaaggatgcattacatgttctggaactggagttacaggtggttgtgaactaccatgaggggcccagtcctctggaagagcagtaagagctcttaattgccctaatttgtcttaaaaaaaaaaaagatttatttggggctggagagatggctcagagattaagagcactgactgctcttccaaaggtcctgagtttaattcccagcaaccacatggtggcttacaaccatccgttatgagatctggtgccctctactggtgtgcagatatacatggaagcagaatgttgtatacataataaataaataaaatcatttataaaaagatttattttttctgtgtatgaatgttttgcctacagatatgtaagtgcacctcatatatgcctagcgcccatggatgctagaagagggtgatggattccctggaactggaattacagatgcttgtgatccaccaatacgggtactgagagttgtacctgggtcctctgcaagagcagccagtgctcttaaccactaagcctttttttttttttttttttttttttttttttttttttttaaacacagggnnnnnnnnnngtttctctgtgtaacattcctggccgtcctagaacttgctttgtagaccaggctgatctttaactcacagagattaacctgcctcagcctcctgagtgctgggattaaaggcgtagccaccaatggcagtcaatttatttatttttattttatgtgtatcttatttgtgagtgcctgcaggtatgtgcatcttttgcttagtaaatggaggtcagaagaggacattagatcccctggaactgaagtaacaagtggttgagtgctgaccttggatgctgggaaccccagcctggtccattgcaagagcagcaagtgctcttaacctctggccctctctgcagcccctatttttattctttttctgtttgttttggtaggaaagcaccataccactcagccacaaacccagctcactggtatatttttaactccaggagaattgctaaccttttttccgaagtggtttggctcttgagaaaggccttaattactttgtgtctcaggctggtcttggacggtcctgccctagcctgatgacaggcaaggctgcaattgccacgcccagcttgcaagagtgttaaggagatgtcatagaaatgtccctaaggcaaagtctcgttttcaaaatgcaagtcaaagcattttctttgtcaaagaacaggttcccacccgggttacccgaggggacagaactgagctggcatgttaccagaaacttcttcagacctgcacagcctgggagaccacggcagcttcagcaccaggctcgggactctctcccattggctctgtaccagtcctggtgtgtgtgtgtgtgtgtgtgtgctctctcgagtgcaattgcagttacagcagcccagactctgcagcttacataacaccttgtgtcagggcacggtgctaagggctgaactcaaatcttatccctacagttattgtctgtgtctttgtttcatggatgagataggcttcctcaagaccatatattcacacagtaggtgtcagattgaacccaggactccctcgttttggctcgttagtggtggcagggagtctagaaccgggtcaccatggtccacttccattttcacccatttaattttccagtgagcccctgggaaggcaaggctggtcctctgttgtcaggttgggagagaggctctgaatagctgggctgaggcaagctggatttggctcccaggaatttcggcttagggaacacacgctttcctgcctttctggggcctcgtgactctcagcatgctgctcactgcccttactcttaggtttggtggtttatgctactctgaaagcttaaactcaaaagtcgtacctataataactccctgggctacaggtacctggctggtcattctgacccaatgccacccttaaggagaggccagcaccccaatttgggtcctggtgcaggaggtgagacaggcagcgagtatgaccccaccctaaagtcttttttttctctagtatgtgaggctcttgaaggtctcaaggtcacctcagaggaccatttgcaaccatttgcaaccatggatgagggcaggagaaggtagaaggatcaaggccaccctgagctaccggagatcctccataaaaaaataaataaataaaataaaccaattagtctaaaagcaaaaaaaatagagccaatgaaggtcaaccagcaaatgcagctgctggtgaccagacaggaaggggcagagatacaaccttcccatcgtcacaggaagatgtggtactgatactaggccagacaggacaggaagcagggtgaccttgggaagatgtcagtgcagacaatggctttaattttgtgtgcaatgctgaggatgagcccagggaatggcacgtgctaagcaagtgacctacagtgccatcatacctcatctctggcctttttttttttttttttggatttttttgagatgagatggggtttctctgtgtcttggaggctgtcctggaactagctcttgtagaccaggctggtatcgaactcaccaccaccgggccctttgtggatacttttaagagtcacgatccatcccctctcagctgggcagtggtggtgcacacctttaatcccagcactcaggaggcagagacaggtgaatctctgtgagtttgaggccagcctggtctacagagtgagttccaggacaggctccaaagctacaaagaaaccctgtctgggaaaaaagaatgatccatcccctctcattctgtggtgtcttacactgccttacacaggagtctagaaaccacttcctaggaactctctgaagaaagagaaacacatttccatgcacgcccattacccacacttctacagaaaggaagcccagaatgcagaaagggaactgaggccactgtgttcccattctcactggtcacagggaaaaccagatagtccagagtgttctgtactggtgagctcagcagtcctcccagcagcagccctacaggacactggcctgtggctgaggatacggctgtaagccacagaacgtgctgtgtgaactccacactcatcagttgactgtcaaatgtctctcaactaagagcagtggaggttaagatgtaaaatatgggtcttaggcgggcgttggcggcacacacctttaatcccatcactcgggagacagaggcaggcagatctctgtgagttcgaggccagcctggtctacaagagtgagttccaggacaggctccaaagcaatacagagaaactctgtctcgaaaaagcaaaataaataaataaataaataaataaaatatgggtcttgaactaggtatagtgcacatacctttaaagatagtacaggagagttagaaacaggcagatctctctgagtttgaggccagcctggtctgtgttagcgagttccaagccagcttaagactacatagtgagactgccttaaaaaaaaaaagtttataagctagttaagggaaaataagagataagtatacccacataaaagtgtttctatatttctgtgtgcctccatctcacacataggaactaacattattatttcacgtatcagaccatatataacaagtacttttctccttctatgatgaagccacagagctaggcgtgactgccagtgcctattaatcccagagctgggaacctgaggcaggggaattgctacagatatgaggtcagcttgttcttcacagagagaacttgtcttacccccctccgcacacattctccacagggggaaaaaggagatggagccagtgacagagctggctgagtatgaacagaacgcaaaggcagagaacacaagtgtcctggaatttacttggagtgaccttatcatgggacaggacgaagggcgaagtttcagatgaagcactgaatcagcaggagagtccctgtgacaccgacctggatttaactcctgctcccttactgacaatgaaacttacccatctttcccttgtagcttgttgttgtggtttatttgttgtttttttttgggggggggcggttctgagacagggtttctctgtggctttggaggctgtccttggaactagcccttgtagaccaggctggcctcaaactcatagagatctgcctgcctctgcctcccgagtgctgggattaaaggcgtgcgccaccaacacccagcttcccttgcagtttttaaggagataattgaaaagtccgttttactttctagaaggtaaaatgtgtattgacagtacttagtggcttatttcttctccattctccattcagatgatcggcatattgaaaataaaaccaaaggcccatgcattctcaggattctagacacagtgatttggacactcaggtgtaacagtgcttgctctgcctttattttgtaagcctatccatgataagtctccactggcctgtaccagcacccagtccaacactgatatataatcccagctctgccttagttcccagagtgaggaacacaagaagcccagctttgcccaccaagcaggcttgcctggcctgggacacagccacttccttgccagcagggatttggaaatattctaagttctgagtgtgtaacctcagtttccttacatttttccaatgcctttgcttttcttcttcctctttcgtgagcccgtgcagaacggaggtcaacttctgctccccacccaccttttttttttttttgaaacaggatctcttaccgaggcttggaaagacggccatgttgtcccaggcagcagcttgtccccacctcctcagcactgagattgcaagggagtgcccagttgctcagttgtggttttctgtttttgttattactattgttgttttgagacaaggtctcacacatagctctaactggtagaccaggctggcctggaactcactctgtagaacaggctagcatggaactcacagagattcatctgcctctgcctcctgagtggtgagactaaaggagtgttagagcaaggctagcatatccggctagattgattttactttatttatggagctggagagacagctcagtggttaagagctctggttactcagattcaattcttagcacctacatggtggttcacaattatctgaaactccagttccaggggatctgaaactcttcttctggtctctcagggcactgggcacacacatggtgcacaaacatacatttaggcaaaattctcaaacactaaaaataacgaagtaagtaataaaagattttttaaaagattttattaatttgaaaaaataatttctattctatttatacaaatgcatgctttttttcttttttctttttttggtttttgagacagggtttctctgtattgctttggagcctgtcctggaacttgctctgtagaccaggctggcctcgaactcagagatctgcctgccttggcctccctagtgctggaattaaaggcgtgagccaccaccgcccagcaacatatacgtgtttttgtgagggtatgccacatgtgtggatgcccgtggaggccagaagaaggtgtcagatcccctggaggtggggttacaggagattgtgagccacctggcttagctttttcccatcccatttccctcactttctctctccaattcaggtcctctgcaagagccacaagcacttttaacggcagagccgactctccagacccaagttttggcattttggagacaggatcttactctttagcccaggctacattggagctcaccgtgaggttcacattggcttctaactttaagcaattctccctacaacccacccagtgtttagtgtagtattgggttcgtgttgaccgtttaaagttccaggagtctcctctggtcagttgaggtcaggtcagggtaaaaaggaggagccgccttctgggcgtggttgcaaggcctgtaatcccagtgcactgaaggctgtggcaggaggattgctgtgagttcaagtccaggttgaactgcagaatgaggccttgtctcagaaaaccaacaataaggcaataatcctagcactacagaggtggacgcaagcgagtgaggaactcaaggccagcctgggtacatgagacactgctcaaaaaaagcaaaaaccaaaataataagaaaggacacattaaccaatagctttttgttgccttgctttgctttgttttttgagacagggtctttcgtagcccagcctgaccgtgagctcccgatcttccagcctcgcttgggtgctgagatttttaggagtatgtcaccatgcccagattttgctgttgtcattgattttgagacagggtcttgctatgcagccatgcctggcctggaatttttggtatgtaaaccagagacctcaaggtgacagagagcctctgtcccttcagttctgggatgaaggcatgacgcactatgccagcaatagttctgatttttttggcacagggtcctatagcccaggctggcctggaattcactgaatttctcctacctctatctcccactagaattacagacactgcacacaggtgactccctgcaagaacatagcatccgttacgggaggacagaatgggtgtaggatggtcaaacctcagaaaacacacacagcattcccattccccacactccaacttctaaatatccctgttagacgtagccaaggaatctaccaaaggtttttttttttgttttgttttgtttttgtgagatagagtttctctgtgtagtgtgtagccctgtctgtcctggaacttgctctgtataccaaactgtcctcaaactcagagatccacttgcctctgcctcccaagtgcaggcaccatcgcccagatttttgaaaaaaagatacataaaaataaacctatctgtgctggattgtaaaaatcaccttttatttttatgtgtatgtgtgtgtagttgtgtgagtttatgagcctcacatgaactcaggatcctgcagaagagggcattggatcccctggaactggagatacagacagttgtgagccaccatgtggatgctgggaattgaacctgggtcctctggaagaacagccagtgttcttaaccgctgagctatttctctagccctttgtgctggatttttcccaagaagatgaatggatggcttaacaagtttggctttacttactctcagtactgatcataaggactaaaggagatccagttggaaagtgtctgttacgggtcctgtatgtggcaagctgcgttagctgcctgtctccttccagcctttgctgctcaccggagccaactagagctggccaccctagttccccagaggcatgcgatagataccatgatggcaacttaaagttgttgtaattatcacttttagaggtgcattcattttcatgtgtatttatgagtatctgatctgcttgggcaccatatacatgcttggtgcctggggaggtcagaaggaggtgttgagagcggggagtggggttacaggcagctctgagcttccatgcggtgctgggaaccacaccccagtcctctgcaaaagcactatgagctcttagctatggggccatctccccgtcatcattattttgtttatttatctgagtctgtgctcttgggtgtgtgctctgctgtgtgccatggcacgcacatgaataactctgaagagttaacttttttccttctaccatgtatgtgtgtctggaattgaactcagtttatcaggtttggtggcaagtgaccctcagaattatcttgccagcccctggcaacttagtgctggctttggtaggagtatttatattatagaaatcagaaatgaagcaaatcagggcctctccaccctgactccaggcagacatttctgttcccttctttctttcaaagatatgagctgaaccgtggaggacggtgtgccagagaggagaagtttggctgtgagtgacacagcatggtggcttctctagctataaactcctttctcactgacagagtccaaatcaaggcagatcaggacataggcggctgctctagctgtggcctcactgtcctcagcacctggtagaatcttcatggttcaaatcaagatggcagcttgaactcttgccagtagggggggcacactcctgttaaagaccaccgaccgaagaaactcctggctgtgcatacttcaaatgtgctgaaatgaagtcctgctctgtctggctgcaggtggaggtctagagagggctgagctggccttgtgtcctgtgggaactgggaggaggagggtggcttgggcagttggccaccccacccacaaaggagcagtgcttggaaacctgtaggaaggggagaggcaagttggtgtgccaggaagaaggggagtttgtgctttgagggaactaactggaatagaagcaggaatattaacaaacgaggttaagtaaataaggtggcgacccgctctctgagcatcttggaaaggagacaaaagaatcttttatctcccgccatttggttactccaggcagtagtgaacttttcttcagaaagacaaatcatcagaggcattttagaattttaatctgacacacatgtgtgctgaacccatgtggagtaggggagagacacgaggtgtggcagggagcaccttcaccttcatgaactggcgggaggcatggaagtgaagagggcaagaaaggagaagcagttgctaggagatgctttgggatggatggatggtctcataatggacttccggatacggggtttgagggccaggctcccgaggagaaaaaagaaaaataatacactcgataggtgtttgagagtgagttacctagaagcacaaccataggcagtaacttgtgttcaagggatttactggaggacactctcaggagagagaaagtgagggaaatgggatgggaaaaagctaagccggtgcacacttagactggaaactgcatcagagagtcaggagttaggcttgcctcagagcaagggtggcggtggtggtggtggtggtggtggtgtgtgtgtgtgtttctgtgtgactgtatgtgtgtgtctgtgtgtgtgactgtgtgacagtgtgtgtgtgtgtgtgtgtgtgcgtgtgtgtgcgtgtgtgtgtgtgtgtgtgtgtgtgtgtgtgtgtgttgtgttgtgtgttaagtgctggaacaggatcttggcccaaatggcagcagtggaagcatccgtgttgggtgtgttggatttgagtttgtaaggaaacaaaattggcgatagctaatgagaactgggaggcctgaggtcagggttcacatctgaagaatgggaacagacacacagacgttggactgggcgacccatggcacacgggtgacatattgaacaagcttggagctcgtggaaggtcacagatggacagggggcactccttttggaagacagttgacaccgtggtgggaaggtgggtgggaggagaaggacacccggtggtgtctttgtcaggacggggagtcaaaggaagatgttgaagggcactgtgtaggagaagaggtggaaatgtttttgttctgagctgtgctggcctttcagggaaaagctcgttgctaactgggtgagaagccacagtgagctcatattctgaggccagacattctgacaaacttagaccttccctagggcactttattttctgttcctttttggtactgggattgaactttggactctcacaagctagacaagtgagtgtccttccactgagctatagtctcagcctctgaattttttttctttttttttttttagtattcatttttattttaggtgtttagggtttctctgtgcctttagagtctgtcctggaactcgctctgtagaccatgctggcctcgaacttacagaggtctgcttacctctgcctccagagtgctgggactaaaggcatgcgccaccaccacctggcctccatttttaaaaattttgaggcaagttcttactaagctgcccaggcttgtcttgaactcactctgtagcccaggcaggccttgaacttgtcagctcccttaacctcctaagaagctggggttacagccccagtcgctagtgagccttgggctgaaattcacaaattgctcaactgacctaaaacgacttcatggactggttgcatcatatacacagcaaaccactctgccttggaaacaccagacaggctttgccatgttcatggatcctgccggtgaggcactggagcagagtagtggggacaggcttgcctctgaaatgggcaactggaatcacccacagcctcctctaccccagtgggtagtgagtgggttccggctattgttgcagggcctcaggtctcccggggtggtaactgatctcatgttaggactggaaactgagggaatgcctccaaggacaagcagtgtggagaaagccttgaggtgtttttgctagctcaggcattgctggccacagtagaaatgggtctcctttgctttactttgcatttctcttgcatgctggatggttgctaagagaccaggctcaatccctctccccaggcaaaactagggctcaaacccaggcctcatgtgtactgtgcaaacactctaccaccgagctttaccttagccccctgcttgatgccactttcaaaatatttattttattttattttgggttttttgagacaggatttctctgtgtagctttggagcctgtcctggaactcgctctgtacaccaggctggcctggaactcacagagatttgcctgcctctgcctcccgagtgctgggattaaaggcatgtgccaccaatgcctggcttattttatttttaataatgattatgtgagtatgtctgtgtttgggtatgtgaatgcgtgaatgcaggtgcccaaagaagctggaggggggatgtcgtatcccctggggctggagttccaggtggttgtgagctgcccagtgtaggtgctgggaacaacttgaccctgtgcagaacaagtgctcctcactgctcagctgtctctctagtcgttcccctccccccttttaagtaaaagccgagaaaggagatctatttgttatggtcacattaggaacaaataaaggatttcagtgacaccccacttctttttgagacaggttctcatatacaccagactggccttgaacttgctaaataaccaagaatgacttgaacatttttttttgtttttgagacaggatccttctctggccgccctgggccttgctatgtagaacagactggttgaaatcccagaggtctgccagctcttagtcccgagtgctatgattaaagctgtctggcaataactttttctctttgaagttgcttctgtccttccactgtgggttctgggaatcagactcagtcagggtggagcttttaacttctgaatcaggatgactcttccttcctcccttccttccttccttccttccttccttccttccttccttccatccctccctccttctccctcttcctctctcttcctctctctctctctctctctctctctcttggaggacactctcaggagagagaaagtgagggagcctggagctcactgtgtagaccaagctggcctcagactcacagagatccacctgcctctgcctcctcctgggtgctgggactaaagtaccattaaagccttttaacaacctcctcctccttctgctttttatgacattgatttacctacttttgcatatgaataacagtgtgtaatgtggcgatcagggaggaactgtatccatctcaagtgtcaggcttggtgacaaatgccttcacttaccaaactaagctatcttcccagactgatagcatcacttttttttttataaccgaattgctttcctcacaccccattggacagaatgggctcccacagcagagtgtcagtcatgtgccaaggagagcaagtagcaggggcagtagcaggggcagtagcaggggcagtctttggaaaatgctgtagttgtcccttattgtagaaggatattttccacgacttcccttgtatgtctaaaaaacggtaccaaatccacataaaccatgttatctatgaaaaagtttaactcataaattagggacagtaatagataaataataagtacagtaatatagtatacttattataatactgtagtaaagattgtgtaatgcagtctcttgaaatagcttactgtggttgggcagtggtggtgcacacctttaatcccagcactcgggaggcagaggcaggtggatctctgtgagttttaagccagcctggtctacagagccagttccaggacagcctccaaagccacagagaaaccctgtctcataaaaaaaaaatagcttactgtgtagtactcatcctggattttatgttgacgtgatgaactgaggggcttgacataggcattgtgacacagcaccaggccactgctgacctttcaagcatatgtcggaaggctcccatcccccaggggatcctggatcacgggaccatgatgatgcaaaggtgagtagtgtatacagaatggatacgctggacagagatgattcacaccctgggtgggacagcactagatttcatcacgccactcaaagcagcagagctcacgggttgcttatctctgtaattttccatttgctattttcaggagtgaccgagacctgagtaaaagcattggtagggttattgctgtagatgtctgtggccggaagggcactattcagcccaccatcttcttttcacataaagtgtgcgaattgatctacagtagctgtcaagaggatttcagtcgagggaactgaggctcagaggggaaagtggtttggccctggttcaggtccaagcattcagttgtgacaggaggtgacccaggtctttaggtgctcatctcaaccaagaaaccagtgctttcaccctgggatgtttctttagggtaatgaccccatcattcccatatcagcatggggccaccacaggggtacaggcaagccctgggaaccctgctgactggttctgcattttagaggcatggtgacttattttatttatttaaaataattatctatcatctatctatctatctatctatctatcatctatctatctatcatctatttatctatcatttatctatctgtcatctatcatctatctatctatttatctatctaccaatcatctatcttttatttttctgagacagggttttgctgtgtagccttgactgtcctggaactcgctctgtagaccaggctggacttgaactcacagagatcgacctgcctctgtctcctgagtgctgggattaaaggcgtaggccatcaacacgcagctgttattttatgtgtgtgggtgtttcgtctccatgtatgtctctgcaccatgtgcctgtctggtgccagcagaggccagaagagggtgtcaggtcccttaggactccagttacaggtagctgtgagttatggggtgctgggagccccaaaactagcccttctaaaggagaagctgatgctcttaagcagtgagccatctctccgacccaaacattaggtgatttaaaatgaagactttaggtggagctggataaacaaattttcaaaatgacgactttatatgatttcctagaacacagccttcacgctgagttcagcttctgaattggaggggtcaggaggaagccccctccaatcccatctcagggtcctggttgatgagtgaggggtgcaaggtgggaggtgggtgctaatgggatctccccagggacagctcaggtggagcctccagacccagatctgcacaggaggaggggaaaaccaaagtaggtagtggctggggctagttcctgtaggttcaactcagaggtgttaggtttttgcttaaaggcgcgctctatggaacatgaaccatggagagcataaagagtatattaattatattaagatgggagagtgagaaatggaagaacagagtagagcagagaaagagaggtacagaaaagtgtaagagaaggaagagaagagggagagaagaggatgcagagagggcttgtttgggtgtcaaatgttattcttttgcttaaattagaaatgaagaggacgggcgccgaggacgaagaggacgggcgccgaggacgcagtgcacgatgggtgcttatctcatccgggagcaggccaggacagattttgggacttgcatcaaatcaagcctccgtttctaaatcttgctggtgcccttctctctccccaagcaatcttcggctatatctctttagaaatgtcacaggctagcgatttcttttggagattagagatcaggaagggtttttgaaaccacaacttccacttctcatgcggggactggaggcgcagggctttctcctcttttgttgtaccaaggacggccacctcttgctcgacccacattcctgnnnnnnnnnnnnntcctgctcccctaagacaccagcagagtgttcatggataggtgttctttgttttatttatgtgtgcatgtatgcttcagggattctttgccggaggaggtgtaaacaaacatcttcctctttattggacaccaaaccaaaccaaaagtaacatttcaccaaagtccaacttggggaaccagtgtacctggggggtttacctaagagcacaggtgaggggttactcacaggagcacgagtaacccccccccaaacagccacagcactggatctcaccctaaagtggatgacaacatctgtcctatcttagggttgatcttagctgccctcctatgctccagcttcctgggacactcttgaaaaatggacaaataggtgggcatcaccacggttatgtcgggactctgactgggtgccttgaggtacacacataaaaatcaggttttgtggctcacaaccacctataactccagctccgggggacctaacacctctggcctccatggacactcgtactagtgtgtgcctccctgtgtatctcaagctggcctgaaacttactatgtagcccacatggacttgaacttgtggctctcctactgcctcagcttcctgagtgctggggttgcaggcaagtgccaccattcctggtgtggttgggctttctctgcccagttctcccatcctctctctgctgaagggacagactcttccatgaaatccccgatgaaaactcactgtgtctctgaccgcccccattgctccagcttcaccttcgtgggctgtgggcgggcttccactgtaccatgggtgagtcacccttgtttctttgttcatgcctggttcatgcctcctggttcccccacacaggaattactccccacttatgtcatcagtgccctggaatgtgcactgtcctccaagatagcctttctctccacatcctctactgttttgtttaaactaacaattattttccctcttcggagggttaaaatgagagtgtttgttgtggaaaatttagatgcgaaatgtatgcaaagaaagaaatacccacaattctccaacctaatatttctcctctctgctccatgctccaggctttcacgcatgcctggtaatccttctgctttattttgacaagacctcaccatgtcacccaggctggtttcaaacccagagttctgcctcaacctcctgtgtgcaggatggggatggtggttacgggccaagcggcagcatgctggatgctagcttttccttctttctaagagacctcctgccgtctcccctcccttgtcgctctatgagtaaatcttgtcccttctgttgtaaattcattctttgagaaatctttcctcccccgcaagtcggaactcctgtgacacactctggacccagtatttttccttatagaagtaaccacagctagaaataaactgacatttgatttgtgttcctcttgtttgatatgtctcttagatacgtgacttgatgtacaagttaagaatggcctttcctgaggggcgttggtggtgcacgcctttactcgcagcactcagaggcagaggcaggtggatctttgagagttcgaggccagcctggtctacagagcgagttccaggacagccaggaaacagagaaatcctgtctcaaaaaagaaagaaagagagaaagccctcccacccccgtgtgtgtagtctcatcaagcagctgaggctaacctcagactggtgactctcatgcaagctgagacatgtagacatgggctaccacgcttgccatcttcttgtatgtcctaacggtctcaatatgtccagtacactgaagacattaacacattgcaccagggcactgtcctagaaaaaccatgtgcccaccctcagttactctttttttatttgtttgttttgtgttttttgagacagggtttctctgtagctttggagcctgtcctgttactcactctgtagaccaggctggcctggaactcacagagatctgcctgcctctgcctcctgagtgcttgggactaaaggtgtgtgccaccactgtccagcatcctcagttactctttgtaagatcaatttgaagacagaggatgtagttcaattggtagactatttagtaagtgggctgtggtttcagtccccagcaccaactagaataacttgggtgtggcggcacatgcttgtaatcccagcactcaggaggtagatgcagagggatcagaagtctgaggccatctgcagccacaaggtgagttcaaagccagcttgggcatgggagaccttgtctttaaaaagcagggtgtcagggacagggcactgggaaactagcttagtgactaaaagcattgttccccttgtagaagaccctggtttggttcccagcatatatgtggtgggccaaacaatctgaactctagttccaggggatatgactaaatcttctcacctttgcaggcaccaggcacacattggttggacgttatacatatgtgcagacaaaacatttatacacataaaaataaaatgaaaaatgaaaggatcagtgggtagagatggcttagcagttaacaatgcatactgatttcacaagaggacccaagtttgaactctgtctcccatgtcagacgatatatgatggcctgtaaggaagctccaggggatcggtgccctcttctacccatgtgcaggtgttcgagcacacagattcatataaacacataactaagaaggatcaatttgacaaacacagctcctcaattacagtgcacctgacatggtcccagggacaggacaaggagccagaggttcttgctcttgctcctgaggagccctcagtcattgaggaagaaatattagtgaatgagattcctatacatctctcaactatactacagccaaggttaggctatgttcattggcagaatcctggggaagtgacacccaccaatcccaccacctttttttttgttgtttttttttttttttggttgtttttgagactggtttctttgtgtatccctggctgtcctggaactcattctgtaaaccaggctggccttggactcagagatctgcctgcctctgagtgttgggattaaaggcatcccaccacggccagactcacccaccctctcaaagatgatttatttttatgtgtgtgtgtgtgtgtacactacatgagttcatgtatatcatacgcatgcactttcctcagaggccagagaaagtgtcacgtctcctggaaatggagttataggtagatgtggaccacctgatatagatgctgggaaccaaacccaggtcttctgcaagagcagcatgtgctcctaactgctaggctctctaaccagatttaacaccacttttaaatttttgcccttgctaatgagttaacctcacaggatctggtgtcattgggttatgtaggattgtggaatcacaggttggtgagataacattgaaggtaccagctccccatttcagcagccataacagcttttctgaccttgccttggttactagaggttaggtgcctgcctcgtggcaaggaaccaatcagaagttagctagtggcgctatgctttaaggctctgggtgtgctttacggacaagtgcacagcaatgactcatagagcatagcaaccaccttgggagggcctatgggccataacaaccagttggccaatcaacacagggcaacccctccaagcctggacctgagcccgtgcgtacccctagacactccccttacgctgccctacaagatctctatgcagcccctttgagcggtctttgctagccatccgccttggcgggtaggtgaaagacccgagctaacatggggtaagcttgttaaacaataataaagcctcatgcagtttgcagcaagctttcgaatctgcctggtgattggggtgaccacagtcctgggctgggaccccggaggcctgagttttccgggggtctaacaacagtagtgcaatggcaggtgggaaaccgagccaggacagaaaggcagaatattgcagggatctggagggggctcttgccttggaatcttgttgaagacgagatgccaaattgagagccaaggatgccaacaagggccaggaggatggctcactgtggcaaagtctgatgacctgagcctgatccctggaatccacaaggtggaacgagaactgtctcccacaagctgtcctctgacctgacaccctacccccatacacaggaagtaaatacatgtaataaaaaaaactttacagaaaaaaagaattccataacaattaacatttgctgtggaagttgccaacaaagagatgatatttcttttatattgagaggtgtcaagtaggaatgttaaaatagcaatgaatcaggcttgaggactaagcatatatgacgctggtccttgcctcccttttccggaatttcacaaacaagactagtaacttttgtttgtttctttgtatctatttatttatttgtgtgtgtgataggatttgtaatttctgtttatagtagcaataccctaacctcccgagtgcctgtgacttaaaacttgaccttatccatgcaatcccgtataaaaagactcacttaattccttagcaaccctttgaagaactcaccaaaattgtacacatgggggctaggagtaggttttacttggtagagggcctgcctagcatgctgtaggtttcatgcccagcaccccacactctgggtgcatgccctaatattatcccagcacttggagagtagaaacaagtggatctaaggtcaaggtcatcctgggatatagcgagcttgaggctcttctgggctactggatatgctgtcacaagtgacaatagcaacagtagatacagcaacagtaacaaagcaaaacccaggttttggaattcctagcagaggccatggctctttctatccagtccaccttaaaagctttcagtgccctccgctcctgcttctcccattctcagaatcttttttttttttttttttttttttttttttttttgtgtgtgtgtgtgtgtgtgtgtgtgtgtgtgtgtgtgtgttgtgtgtgtatgtgtgtgtttagacaggttcttgctacatagccctagctggcctcaaatgcacagaaatttacctgcctctgcctcctgagtgccactatgcctggtaatccttacatattttgatttttccctcataaagatctttctggcgtccacattttccttctgtccacatcatcacaccctaagcctccagcctggagcgcctgcttccacctcccacctctgccctctgctgctctggcttagatccttctttttgaagcctgattgagccatcccagatgcaagcaagcacacacagcctttccctggctgacaactccagtggcttcccacagactttgcaaaatgcgttcaaaggcaccggagagatggctcagtggctgctcttgcagggcacatgggtttggttccagcaccctcatggctgctcataactctctctttaattcctctttctctcctttctttccaagacagggcctcatgtaacccaggctggcctcatgtagcccaggctgacctcaggcccactgtgtttgaggataaccctgaatttgtcaccctcctgcctctatcactcttcagagacactgccatgctgttttatgggcggcctgtcatctaaagctctgccaaccgagctatatccccagtctgtttggttttttgttttttttttcttttctattaaaaaaaatacaagtcaggtgtagtggcacacgcctttaatcccagcactcaggaggcagaggcagggggatctctgagttcaaggccagcctggtctacagagtgagttccagtaacagccagggttgttacatagagagagcttgtctcaaatttttaaaaattaattaattattatttatgtatgagtattttctctgcatataagtttatgcatcgcatatacacctggttccccatggaggccagaagaggactttggaatccctggaactggagtcatagacgattgtaagccccagtctcagtagtaattatatccttcttgtgtaatcttgtttctcatggctgtccagccccatgcttgcctatgcaagctggacatggtggcacctacatctgtggtcccagcgttggcttggcagaggctggagaatctcaccttgagttccaagccagcctggtgtatataatgagttctaggccagccagtgctacatagtgagacacagaaagggtttgggggaccgtggaccaggggccactggaaggttgtatgtatagccggaacaaagcccccacactcgcactcccgtgccccagcctgtgcatctctacttttgaaatctctttatgatgaactggcagacacagcatttccctgagtgctattgtagacagaagtttctgtcctgcccagtccctaggccatttagtcccaaataaacacacagaggtttatattaattatgaactgtttggcctataactcaggtttcttattggctagctctcttaattactaacccatttctattattctgtgtatctctacatggtcttggcttactggtgatgcccagacctcttgctcccttggcagctacatggcgtctccctggcaactcactctctgaattcctctcccagaattctcctagtctggtagccccacctatacttcctgccttgcctacatcctgcccgtccattgaccaacacagatttatcaaccaataagagaaacatattcacagcacacagaaagacatcccccattagccgtgagctgtattcacaaggtaactgattatgtagaaggaattatgggaatcccaatttatagcacagttaagacgaacttggacactgtaatgaagagttatatgttgacttgacacaagctagagttatctgagaggagggagcctcaattgggaaaatgcctccataagatctggctgtaagacattttcttaattagtgattggtgtgggagggcccagcccattgtgtgtggttccatccctggactggtggccctaggctctataagaaagcaggcagagaaagccatgaggagcaagccagtaagcagcaccctccatgacctctgcctcagctcctgccctgtatgagttcctgctccgacttctcagtgatggactgttaccttgaagtgtaagctgaaataaaccctttcttccctaagttgccatggtcaggctgtttcatctcactgatagaaacctaactaggacagaagctggtgtgagagttatggggtactgctgtgacgggcctgaccatgtttttgggaggactgtagaaggattttggaactttgggcaagaaaagtcattgagtgttcagagcctggtgagcttttttggtgggagctgaagaactggttgacagaggccaaaatcaccaaagttaagcttttcctttactagatgttggtcagccagggatgaagactcggttgcgactaagaagaggccagccattgaggggaaatcttctgggacttcctcagggtcagccacacaagctgtgttccagaggtggtaggtaaggttacaactcatgctggcagatgaggttgatactgtagtgtaagagtcacctacgtggtcctggttttgaaggcatgaaggggtcatggagagtagctgagacttggcgttgtgtgacagggttggagtccctgaagagagcccagaagacacggtgaaaagtgcagcccagttgcaacaagagacctatcttagttagggtttctattgctatgaagagacaccatgactatgacaagtcttataaaggaaaaagaaaatatttaatgtggtggcttgattgcaattcagaggtttagtccattatcatcatgacagcctgcaggcagacatggtgctagagaaggagctgagagttcttgcatcttgactcacaggcaacaggaagtgtggtctgtctctctgggtgacacacttcattccaaaaaggccacacccactccaactaggccacacctttctttctttctttctttctttctttctttctttctttctttctttttttgagacagggtttctctgtggctttggagcctgtcctggaactagctctttagaccaggctggtctcgaactcacagacatcctctgcctccccagtgctgggactaaaggcgtgggccaccaatgccttgcaagccattttcttttaaaccaccacaggcactggcgtgtttccttatcagtaaatgtgattaagatttttggcttccagagagcactagggactggttttgtgcttttccaactcctaaatcagaaaatgtatagccttttttcttatccctcagtcaggttctgtctaaaccctgggaatgcttccctgacacaccgggctccttcactctgtccctcaagccctccccactctttgccatgtggcttctggttggcctccaccgcaaacagcatggctttccctctttcccccctccagcccctttttttctggcagttgttgggatttgcaactgtttttgtagtagttgttgttgttgttgttttgggtggggccctgtggggctagagatgtgtctcagttggtaggctgctgagtcatccgtcatgcgtaaagccctagagtcagtccccagtgccacacagaactgggtgcagtggtctacacctgaaatctcagcatgtgggaagtgtagacaggaagatccgaagttcgaggttggggctgagagatggctctacagagagcacttaacactcttccagaggactcaggttaggttcccggcacctgcaataccactcctaaccctagctccagggaatctgatgccctcttctggactctgcaggcacctggtaggcctggtgtacagagatgcacacatacacataaataaaataaatgttttttaaaaagttcaaggtcaccctcaactagtcagggtctggcttgggatacataacaccctgactaaaaaaaattgttggagcctactccaaggagtagctgggttacctgagtaggggcgtgaggattgagaaacagaagataaagaaatagatccagaaacataggatagcctggcagtggtggcgcacacctttaatcccagcacttgggggcggaggcaagcagatctctgtgagttcaagaccaggttggtctacaacagctagttttaggacagcctccaaagccacagagataccctgtctcgaaaccacctactccccgccccccccaaaaaaagaaacacaggacagattcaggaggactggcgggtccatgccttttagcacaccggacagccccaagtttaatttagatcctgcttaaatacagactggaggcaaagcagaataaagaacagtataatcaattaaccagctccctgcactctccttgaattgaggagcaggcaggttcactatctatcatgttggtcctgctagcagctgcattatctgtctgtgtgtttacagctggaatcagtagctccttagagagataatttactctatctcacgggcttaatcagaaatttctcacagctctcaaggagactggagcaagcaagctggaactctaatgtcttagaagtcaggatagactccagatggaaaccgagtcacttgtgggctcccacaaaaaataaatagataaaaataaagtggtggctgtgagttcgagaccagtctggtcttcaagagctagttccagggcagcctccaaagccacagagaaaccctgcctcgaaaaaccaaaaataagtaaaataaaataaaataaaggtggtggacaaagattgggtttaatctccagcagtgccccttcaaaaaaggagggggccatttcagagactgacatcttgttctgaaggatttgaccccatctctagaacaggtcaggactgcataagattagaatgcttggaaaggacaattcattatgaacttaacgtaacaatttgtttagaactaacaagcaataaaagtgtctcctcagggcagcctggacacagctcccttgtccttgtttattttattttatttttttttttttatgttttagaagaagcaggaagaatctggctgggacctgtttctggtctggtagaaagggtcagaggaggggctagtactctgctggctgctggactctggacctctgggaactcagagactggagcctgtgcactttcttcaggtcacagggacccctcggtctgttctagagcagagctgcaggtgggactggctgcatgagaccatgaatcaggcactttcagagccttggcacaggtccccaaccccagctagcaccagcaaagatcacagagaggagcccacgcacggtacttgcctgttatcccatcatccctgtaatcacatcaccccggaagtaaggacccagaggttcaggctggtctcagctgcatatagaactcaagaccagcctgggctacaggaagccttgtctcagcaaacagcaggagagaagctggagatggctccgtgggtgaagaagcacttgctatacaagcatgagaacctgaggtcaggtcccaagtatctaggtaaaagctgggaaagaggagggtggattccaggggctcttggccagccagtccagcataaaccacaagctctggggtcagtaatagactgtgtctgaaaataaggtacagagcaataaaggatgacatcaaacagcagcctcctcttcctcatatgtccttacgggcgagtgacctgcatggacacacacacacatgcacacacacacacacacacacacacacacaccacacaggccacacataccccccacacacacatgcacaccacacacaggccacacatactacacataacacacacacatataccacacacaccacatatacaccacattcacacacaccacacttacacctcacacacataccacacacacacaacatttagacataccacacacacacacacacacaccatacatataccatacacacaccacatagcacacatgcacacagcacagaaaaacaaaactgaaataactaaggtaataccatcctattctgattctattttgtgtttgcgtagacagttcttagccccctaccttcctccccacaacagttatgtttgccttgaccacatatttgagattccactgccgagacctcagtccagttgtactagccaaaataatcgacaaattacatctaaaataacttctgtgttctgccaggaatgaatgcttcagagttgcactgaccctcatctaactttgatgtattttcctgggttttgcgtttaaaaactgtatcccttgggctggagagatggctcagccgttaagagcactggctgctcttccaggttttaattcccagcacccacatgtcagctcacatctgtctgtaactccagttccaggggatctgacactttcacaccaatgtacattacacaaacaaacaaacaaacaaacaaataatactgtgtccctaaacttggacacccagagacttttgagaggcccttgtgtagcaagaggttccacagagcctttgcatctgggttgaacccaagagtgatagcgcctaggattttccatcttgttaaaagtctgggattgttaccttttgttaaagtccaggattgttaccttttgttaaaagtcaggaactgttaccatttattaaaagtccttttgttaaaagtcaggaactgttaccatttgttaaaagtcccgggttgttatctgagggatccagacacgctaggactggaggtaaaaagtgaagtctctgggatttggcagggacattgggaatttgaactccccaatctcgggagcagcattatgtgcagttactgaaatgcttgttaaaaggtaaagcacaattattgcaaatattaaagatgcaaacattaagtccaggaaaaaggcttttcttggtagaaaaaagaaaactgtttaatgaggaaaaatggattttcctgctagaagggaaaatgtttaatcaaggcctacaaataaaaagggcccataaacaaaaaaataaagggaaggggggggagctcttctgattaggaatagaggaaggagaaaggctcttactgatttaaaaaaaaaaaaaaagaaaagaaaagaaaagaaaggaattactgtcaggtggcacccaatgctctctggctacaagctgcctgttagctccttcagccaaggggctgggcaacgaaaaagagccaaaacacctgaattccaaagaatggtgaggttgctccacagttgcagcctgagccagcacagcctgcccagaatttagaattttcctggttgcttaattttggtttaaatgttttttgtttttccctcagagcaggaataactcaatgttaaaggtcccttcattggaaatgtttttattttttcctaacagtgggaataactcattatcaatggtcccttcatgagaaaaaaaaaaaagttaaaacaagtccaatttcagcagggtggtggtggcacacacctttaattccagcacttgggaggcagaggcaggcagatctctgtgagtccgagcccagcctggtctacacgagctagttccaggacagcctccaaagccacagagaaaccctgtctcaaaaaaccaaaaaaaaaaaaaaaaaaaaaaaaaaagaaaagtccaatttctcgtacaaaacaattgcagtcagagcataaggtactaagccaatgaatgctgtttgaatttccagagatattagccattcatgatatggaggatattattgtcccttgatcctctgattaatgctttaatgaatgtttaattttcatagtaaatgaactaaatgagcaaaatccataattttttaactgtatcgttgggagtgctcttatctgtttatcactagtgaggatttgattctgctctttggattgctttctgaaaaactcttggttaaattctataaaaaatgttaacacctgaagcagagcaagttgttagcttattaagtaatctggtgctaaggtgaagaaagctccacaagtgatctcttactgataaagagccatgacatctggcttgaattctggatgcgcctgggctctgaactgccttttgttaagaagtcaaagattgttatctgagttgatcttttgaaggaattccagagcctttgcataacttaatcttgagaggccctagcaaaccagtaggtttcatggctgagaaagaactgcttaggtaatggttcatttagacaactccagataaggtgtggtttgtgtaataacaaaggatgcttttgcaaagttcagtccatcaagattgaacacccacccccacgccggggctgctcttttgctaagcctgaatcatatttttggagtgactcttttccactgacctgcgcaacactgacactcaagcccactcttggtctggctgtccatgaaaaaaactttaaactcttaattggcttaattggcatggttgttgataactatctctagtgaatcactacagaacaatagcaacaacaaagatcaaacaaacaaaacagaacacctactgatgcctgaaaccaaaaccagccttaggggcaacactagagacctctgacttcctaagcgccacagttaacgtccttccttcctcctgctcctctgtctcttcctgctgctcccttccctccccctcttgcttctctccctctctgcctcttccttctgctccttttctcctcctcttcctctctgcttttctctcctcctccgcctctcctgtcttctccccctcttcctcctcctgtcctctcaccctcctcctcctctcatgtcttccttctactcctctcgctcctcatgttggtaaggctttgcttcgttatttgctgagacagtgtccctgggtagtccaggttgaccctgaacttgcagccggcctacttaatcctcctgaatgctgcatgcaaggttgttttgtttgtttgcgcctttcttggtttcacgcatgctttgtgtgggtcatcagaaacagtcgagtgtggtcgtgctgcccagcactgaggaggcaaagaggcagggaatcattgccagcttactgggctacattgtgagttctaggtgaagcagagctgtgtcgtgagattcggtcacaaacaacggaagcagctggggcaggaaaacagcctgggtttagagcagcccacaggggtggcagggagtgggcggcgctaacctcatagactcttctaattgctgtgggccgtgtaaactgggcatcatgtgacacgggggaggcggagtctgccggacactggagcaccagttaacgactgcttgtgagagacgacagtattctcaactgtggggccttcatacctgccacacaggcatgggtacgtgttacccatgtttgtccctgacaaacagctcaagggagggaggaagagttcatcctggttcaggggttgagagggtacagtggcccatcatggtggcgagttgtggaatattagttgaagatgtgttacttttgtttatgctgtgggacatttgtttaatgatgcaaagatgtgttgcattcttttcctgctgcatttgtttaactccgtgaagctgtgttactttgcctgcctaaaacagctgattggtctaataaaagagctgaacagccaatagctaggcaggagagggggagggggggggctggcaggtagagagaataaatagacggagaaaagccatcaaggcataagaaaaggaggcgagaggacaccagtggccagccacccagtcacacagcaaggcaaggagtaagaagtaaagaaaggtatatagactagagaaagataaaagccaaagcaaaaagtagctggggtaatttaagaaatgctggctagaaacaagccaagctaagtaaggccaggcattcacaagtaagaataagtttccgtgtgagattattttgggagctgggtgtctggcccccaaagaatacgtgtaaacagaaaaaaaaaaaaaaaaaagcaacaacagaggtgccaggttgtgccttgtgatagtaggggtcaggtccatctagaaagttcctttactctgtcaaggaacacttgtccaatgcctaagttgcatacactgggctttggcagtgagcagaacagactgtgttccccgactctgcagtgagcaccatgagtttaaagcaggtatttatgtgtaggggtatgtgtatatgtaagaacgtatgtatgtgtatgttggcatactcgggtgccttgacacatagacagaggtcagagatcagagatcttggtgtccggtgcccttatccactggaccatctcaacatctccttaaccagctctttggttattacaggcaaagctgctctgaacttagagagctgcggatttcgggatttgctacaaagccatcttttttttttttttttttttttttttttttttttttttttttnnnnnnnnnnnnnnnnnnnnnnnnnnnnnnnnnnnnnnnnnnnnnnnnnnnnnnngaggctgtcctggaactagctcttgtagaccaggctggtcttgggctcacacagatctgcctccgagtgctgggattaaaggcgtgtgccaccatcacccggctccatcttttttttttttttaaagattttatttatttattatgtgtacaacattctgcttccatgtatatctgaacaccagaagagggcaccagatctcataagggatggttgtgagccaccatgtggttgctgggaattgaactgaagacctctggaagagcagccagtgctcttaacctctgagccatctctccagcccctcctacaaagccatcttaatgtccatcaggaacctacgtaggtgattagtgtgcacggatgtgcacgcttagcttcctaagtgtgtgctcactgtgcaacgaattgggtttcacagtgacatcactgcagaccacaggttttgattagcattagcatattttgctgccctctcttatctctctccctcccctttcacacccttggtagttcccttgtgctttcatagtcccacaattcaacaaatgagagacggactcagtgctcatctaaatgcaggttctttgctgtgctctccagctctgttcttattgcaaatgacatcatctcatttttctctacggttggatgacactccattgtgtgtgtaaatacacacacagacacatagataaatgaactgcctttctttatctgttcatacaccggtgggcatcgaggctgtttcccatgacttggctgctgtgacgagagcctctgcaaacatgggtgtgcagctctattgtttgtaccgatgttactggaagtatcccaggagtagtacaactggtcatggtaggatttggggcagggaaatgagagcagacaccaagacttgctgcgtgtgagctctgggaggctttttgttcgtttggatttgttttttgagacagggtttcttcgtgttgctctggctgtcctggaactcactgtgtagacaggctggcctcgaactcacagagatctgccggcctcctcctcccgagtgatgggattaaaggcgtgcgccaccaccacatggcttgaggactgggagttgtactttagttctttgaggtacctcaatgttgagttccatggtagctgcactaattttattcccaccagcagtatagggctcttgcccaccatcctcaccagtatttgttgtttgttttctttcttttcaaaggacttatttattatttgtgtgtgtgtgtgtgtgtgtgtgtgtgtgtgagagagttagcgggggggggagagagagagagagagagagagagagagagagagagagagaggagctgcacatgccacagcaaacgtatggaaatctctcctacaacgtggggatcctgggggattgaactgaggtcagcagacttgactgtgacagccattacctgctgagtctcctcactggccctttgaaactatttattattgtgttgtgtgtgatgtgtgtatgggcatgtgccagagcacacacgtggagggcagagggtggctttcaggactagaccctctcctcccaccacgggctgctggattgaactctttacctgttgagccagctcccttacttattgccttcttttctctctttgtttaaagactattttatgtgtatgaatgtattgtctgcatgtatgtatgtgcactgtgcgtatacctgctgccctcagaggtcagaagaggggtcagagtccctggaactggagttccagatggttgtgacccaccatgtaggtgctgggaatcaaacctgcgtcctctggaaaagcagccagtgctctcaacttctgaccatctctccagccctcttgtcttattattctacatgggtgattgtctatctagctcctttgtccatataattaattaaaatatttatggatatgtgtgtgtgcctacatgtgggaactgcacatgagagtgtggctgtggaggccagaagaagaagaaggcttcagatcccctggagttggagtcacaggaagttgtgagccacctgatgtaggggctgggaagtgatctcaggtcctttggaagaacagggagccttctcagctgctgagccatttctccagtcctaaattaatttttctgacagtgctgggaatcgaaccaagggcctttgaacttacggcaatcctcttgcctctgcttcccaggtgctgggatcacaggtatatgctccacactcagctcacttatttgcttctctatttatttatttatttatttatttatttgagccagtgtctggctgtgtggctcaggctggccttgaacttggggacttaggtgctgtattagtcagggttctgtagaggaacagagaacctatagagtaaatctatatctatctatctatctatctatctatctatctatctatctatctagatatatagcaagacataggtatatctatagagatatagaatatagatacagatagatagaagggagtttgttagaacggcttacaggctgtgggccagctagtccaacaatcactgtctacctaaggaaggtaagagaatccagtagttgctcagttcatgaggctggatgtctctcagctggtttttagtatactttggaatcctggagaagtaagctcttgatgtttttgttttgagacagggggtttctctgtggctttggaggctgtccaggaactcgctctgtagaccaggctggccttgaactcatgaagatccacctgcctctgcctcctgagtgctgggattgagggcatgtaccaccaccccgtgtgacccttaagcacacagctggtgaggccttttcggatttgatagtgtcagccacagacttcctccttcctcttcctcccccaacccaacagccacagtttccacttcaaccaccacagacttccaggttttgcctggaagctagcttcttttctgttttctttttgacaatgtctcgcgctgtgtagacacagctgaccttaacatcacagagactgcctgtctctgcattgtaagtattgagattaatcttttcttttttcagggggctgagagggagggttgagacaaggtttcctgtatagctcaggctggccttgaactcataatcctgcttcagcctcccacgcttgagaggtctgtaataattgtctctcttgggaactgccagtcttcccatctcttggaggaggcaccaatgcctcttagcagtcatcattcagaggctggtgagaaaagtgtgggttcccgagtgccagcgagccaacctcacagcaggctccaaactccagtgaagtgggtggggcagttctcaggaaccgaaagacagggattcagcctttgtttctgacgataactgaatattaaacaaatcacaaagcttcgaaccttggccaccaaatctgtaagttgagaacaatcatacccacataatcggggcatactcacatgcagagtcttttacagtcaggaggctcaggggttcagtgtcagcttggctacatagtgagtttgaggccagcttggtctacacagcaagttctaggacaatcagagtgacacggtgaaaccctgcctcgaactgacaagcagatcacaaannnnnnnnnnnnnnnnnnnnnnnnnnnnnnnnnnnnnnnnnnnnnngaaaggaaaagaggagaaaagaagaacccataaagtttaagagggagaagtggggaggccaataagatcaaagcagccaccagccaaggcagaaggaacaatcccttttagctgtttatccgaacacagacaagcatcatttgccatgctggtgcagcaaaacccaagcttggctatcagcgtgtggttacctactcttgagtctcctacccatcagacttggggcatgaagaaaggaagggagtcttccaaaataaaggaagaaaagaatcaggcccacctggagagttaggagggctttctggatacttgggagtcagccagagcagggttcaggacgggaaagaggaggggcactgagctgtggggcaacaagggccccgtggaagaggtgatgggtatcaggggaggctgcagagggcttggaccctgctgcagactctaggttcagaacctgctacaaactcgaggactcaggacctgatgaagactccagtgtgtttagatgttggtcttcctgtggatgggctaccagagatcttggatgccatactgaagaaaatagcatgtttagatgtaagctaaattacagggcaagggtctctgaattgtgctgaatgtcccacacagggcatgcatgtggataagatgacctctggagaatgtccgagcctgagtttactgaatctgctgtgggctgggcatcagattcttgtgggctgctctgtctgtcctgcctgctcttccttcctctcccctttttctccgagctcactttatctctccagggtctcatgtatcccaggctgggcttcaactaattatatagctcgaggatgaatgtgagcttccaaccttcctgtctccctctacctttcatatggagagatcaggcagtatttgtgggttggtttgtttgttttgagacaggatctcactatttatctcaggctggtgttgaagaagcaattcttcggcttccctggtacgggattataggtgtgtgccatcatggttgggtaagtctttgggttatctatccttcatactgtttcccatacaactgtattagtcagacatgatggcattaaccttcctttctgcctgtaagtctgagaagggagaaaaccatttgagccctgaagctggagaccagtgtgggcagccccatctcaagataaatacaaagatgaaaatgaaccaactctaccagttccgtttctttcctttacagtttctctttctttctttctttctttctttctttctttctttctttctttttttcctcccttcctttttttggatggcctaggagctcacagagatctgctgggctctgcctccagagtactaggatcaaaggcatgttccacctgtgtgtgtgtgtgtgtgtggtgtggtgtgtgtgtgagcgtgtgtatatgtgtgcgtgcatgtgtctgtgtgtgtctgtgtgtgtctgtgggtgtctgtctgtgggtgtctgtctgtgtgtgtctgtgggtgtctgtgagcatctgtgggcatctgtgggcatctgtgggcatctgtgtgtgtataagaggtcagagattgatattgagtttctttccccatcactttccaccttacttttaagaacaagttttctcactgattctttagctcattcatttagctggactggctgggaagtaaacttcagggatccccctgtctcagcacccccagccctggtgtcatagatatgtacatccagctttttatgtggatgctgggaatctgaactggggtctctatgcttgtgtggcaggcacctcactggctgaaccatctccccagcccaacctggctttcaagtcatgattctccttctccatgcacctatctgtacatgctgctacagctggctcatgctgaccatttggtaactgagcacaggaatgtcaaattgctcttctcagctgcagaactggccaggggcaggctctctcttcacacagcagggtgcattgctcaggggtagcctgcattctctctcctgcctctttaggcccagcttctctaaggaaggtactcctagccgggactcacactgccatctacttcaggctacaaaagcactcacactgatgacgccactccagcatggcaactatagctcccatgaggagggcatgattactcataactgaaaaaaatgttatcaaaagaagtggagttgcttgtcaaaggtcagagcctggtggcagaactcttcagacttacatcttctgactctgcgtccagtgctcagccttaagttaggcagctgatgcagccagcctcgacctccacgaacttcacaggccagagctggctcttggctgctgcctaggaaaatgctcttcagggcttagagagagagagagagagagagagagagagagagagagagagagagagagggcgttacacagagaagtaaggcgttagcatcgatttccttttgttgagcaatggtttccgccatctggacaggtgacgtcagctgtctggatttcagccagggttctgtggtttaggagcccaggaaacagacttccggctagcagggctctgacctggagggaaagcctctcaacttgcaaagacaggaatcacactcgagggaaggtttcactgcaggttcagtggccaaggggaactgggggtgggtgggtgttctgcgtgagggggcaggaccttcagcaagggaggagcatttcttcatcgcagaagacttttgtggctaatagacaagtaaattgggagtggacgggaggaaaggtaagcaaagccagggtcgcctggaaaaagacacacacgcactgaaggtaaacacaggctgagaatagaaaactgatccccaccctggtaagctttgcaggaacaccaaatcctaacagactgagctgggctcctgaataactttacctttggaatttcaaaagtgcagctcttagacactaagcaatgaatccattaattaagcagaaagcttagctatgctcactccccactttggtcttcaagctggtccccaggtctggttcctgaacggggttactcaccctggcccttgctctaatttcatctcctttggtcctcacggtgatggtgggagggaagaaacatgcttttatctagttactttttttctttctttcttgagacaaagagttactctgtagcccaagctagcctcaggctcacaacaaagctccatcctgcctccagcctatgttttcttaatgcagtaagcaccggtaagtgtaagtgacattacagctgtcctcatggagtgcaaccctcagcagacccaccccacttttgcgctattacagctcctcacccaggaccctgaacatgcttgcacagagctctaccattgaacgacatccacgctccctttttttaaaacttaaaagttattttattttatgtgtatgggtgccttgcctgcatatatgtgtgtattcactgtatgtgtacctgaggaccagggaggtcagagagggtctcagatcccccagtgttacagatggttgtgagctgcctagagtttgctggaattgaactctgatcctttagaagagtagccagtgttcataatcattaagccacctctccaaccttggacttgaagagcctcctgcctcaacctccctggtgctgggacaattgccatatgtcactgtgacaaacaatttgcaatttgctctttgtttgtatttttttgaagattttttttaaaatttatgtgtatgtatgtgtctctctgtgtatatgtccacatgtgtgcaggtgacagaagaggccattggatcctctggagctgcagatcattgtaagctgtccagtgtggatgctgggaaatgaactcaggtcccctgaagagcagcaggaactgttaactattgagccatctttccagtccctagtttgccttttagagggtaaatgaaaatttaacaatattcacagaacagtgtagccattgccacagttgattttagaacatttttattatccacaaaagaccatatgcagagctgagtgtggtggcccatggctgcagtcccagaacttgggaagctgaggcagggggattgttgtgagttggaggccagtctgaactacataaacaagaagccctgtatttatacagagtcacaggcagtcttcacaagtcttttcctctctagttctaggctgctacagatctgtgtattcagggtgtttcagggatcatccatgctaagagtgtgcaccccccacccccacccccggccctgccacttcttcatgtttcccttctggccatttgtttggatgatggttcattttcacggttggcttgactgggttacaatgatcatgggaacacacctctgagtgtgacaatgacggtgtttccaggaagggctccatgaggagggaaacaccctgaaagtgaaccgtccacatgctggctctggattgaaagaagagtaaattgggcagagcctcctgactacagacagacacaatgtgaccaactgcctcatgcccctgccactttgatggactgaatgacatccacattttagctaccatgttaagaacgctgctctgggaattcttacacactttgagtgaaatgtttgtttctcttgggaggggaagtgacatttctacgtcatctagggcacgtggtaattccaagtccagctttttgaggaaataccggcttttagagttcactacataatattcccaccagcaaaatggaatgtcccccctttccccactccctggtctcagaacgtagcccatgctggactgtaacttgtgatcatccctacctcagtctccaaagtagccccatggtagacaccagcataatgctcagcttgtccatttgcaaactgaagtacttgagccaggtgacacacacctgtaatctcagcgctgggaggtagaggcaggaggatgagaagtccgaagacagacttagctacatagcaagcgggaggctagcctgggctacctgagacccagtctcaaaaacaaacaagcaagcaagcaataaatagataaatagaggtattcgtattttttgttgaatcgcaaggattcttttgtttgtttgttttttgttttgttttgtttttttttgagacaagtttctctgtgtagctttggagcctatcctggcactcgctctggagaccaggctggtctcgaactcacagagagccacctacctctgcttcccgagtgctgggattaaaggcgtgcgccaccaccaggcttgcaaggattctttcctcccttctttctccctttattatttaatgtctgagtagttttgtttgtttgtttgtttttgttgtagttgttgcctgtgagtatgtgccagcatcacatggattcagtgcccagaagagggctggagttacatttgggtgttagcagccgtgtgggtgccgggaaccaaatctaggtcttctgcaaaagtggcaagtgcttttgactgctgtagggttttgtctgtggtgtgacatagggttagtgcctttccttcacatgtgcgggtcccattgtctcagcattaatacacttggtttttttgtttgtttgtttctataattttctttcaagacagactattgcactttatgtagcctagaactcgcagtgtagccactcgcagactggcctcaagtttgcagtagtccttctgcttctgcctcttaaatgctgcgattgcagctgcaagctaactcttaaggatcataacgtaacaaaaagggtcacccttgttttttctaaccgttgcccgcccctccgccccccctccccccagttgctcagtgttacacacatgaaccatgctcaggaatacagtgactgaaccaacacaggcgtgttggaggctcagcgaagtaaaacatctgtgtgggtcaggcttctgggaagtgtcacatatgacccaaatgattctttctctggagatcaggtctcacatagcacaggctggcctccaactccttatgtagccgaaggtcacttgaactcctgatcctcctgcctctgcctcccaggtgctggcattacagacgtgggcggccatgcccactttgtgtgctaccggggcttcctgcattcgaattgtgctgattgcacactctacttactgagccccggccccagtcctcattcatttgatttaaagctctttcacacctaagtttctgatgctttcttaggccacccaaaaccctttgccacaagactccagatctccccgaaactctgtcttccgtctcttgatgtatcaggacagagattcaatcttggtgagccacaaactcctgtcctttctgcgtccccctcccttctcctccccagcctgtacgacaaagctttggcttccttgtatggtgttctgttgctggaaggttcttctgggtgtgtgaccagagctacatagaatgccataaacccctgtgcttgttgttacccatgacaggccttgttctgatgctgtggcattcagggtatgcagacagattcaagcgctctgcctggcgggagtcgaggccttgggtaagccaacaccctgtctgcggcacggtttccctttttggacatagtgtctcattctgtgtatcatctctgagtagagtgaagccaggccacatcagccacagctgtaaaaagtctatgcagtggggcctggtggtgtgtgtgtgtgtgtgtgtgtgtgtgcgcgcctgtgtctctatgtgtatatctctctgtgtgtgtctctgtgtgtgtgtctctgtgtgtggtctctgtgtgtgtgtctctgtgtgtgtgtgtgtctgtgtgtctctctgtgtatgtctctgtgtgtgtgtgtctccatgtgtgtccaggatcaagtggagcacagaggacaacctgtgggaggtagttctcaactcccaccatggtgtatactatggattgaattgaagtcatcaaacttggtgccaggtgcctccgcctgttgagtcatatagccaaggggaaaggagggtttcaagaattctacctcttataaggaggatgagggatcgaccttggaagaaaaatagttgtgctcagaaaaataaaaagtgggcatggtggctcacgccactaatcccaacactcaggtggcagaggcaggaaggtctctgcaagttccaggccaacctggtccacatagcaagcaagtttcaggccagctaggggtaccaggagatcctgtcactcctcaaagaggtccctctgacaccttgccaggactaagatcagactctttctattagactttttggaaagcagttacttacactccaggtatcttagacaaggctgggcgctcacagctcctgagctatctgactatggtctttgccggcaccctcagagcaatcctacaggtagttccatcaactcattttggcagaggaggcagctagaacttgcctcaagtctcagagtcacaggtattcaagccagagctttgctgtgtcctcaaagttcacaacgtgtgtgtgtgtgtgtgtgtgtgtgtgtgtgtgtgtgtgtgtgtgtgtgtcaccaagctgactcagaggtcagaggtcaactcaggtactgttcctcaggagtgagacagaatctgtaactaagacccagggctcacagattaggtgaggctgtctggccagtgagcctaagggatcctgctgtctttgtttctatcttcccagacctgggattaaaggcgagcgtttctcatacctggctgggctgcttctgtgggtgctggggattgaaccgtggtctttgtgctgtgtggccagcagttgaccaaacgcaccagctctccagccannnnnnnnnnnnnnnnngcagttcaccctctttctaaggcccagcgttcaaggagcagggtgcaacgaccctcttcctcccttcacttccagtgggttcgttacttattttctcaagaaggagccagctcagaccagctggtcagaagatgtgtttatacaacagggttgatgacctctgtgaatcaggggtctccatccccactgccggatgatttaccaagagcatcatgaggctttctctcggacggtaaaaaccacaacagagccttgaccctttggcccagatgagcacttgagaggacagggcccacacctagtggtcacaaagagctagttgcagaccacactaggagagacacatctgttaggaagggaggaggtgtgtgcacaggagagagactcagctggaaagcactggctattacataggaacaaagtgccaaggttttagtcatggggacttcctggagaggcattgaaccttgtcattatggtctgtctttcaaaagagaagaggtattctgggagcaactacaaaggtggcctgtattagggtaaaaggggctgcacacacaggggagggctgaccgccccccctcttctgaggagtgactctggatgtccagcctgagattttgatgtgggagcagtttgcaatcagtctccactcaggactgcactccagatcctttctgccagccaggtgatgtccctgcagtgacagggatccctagaacaccagaggctacagggtctgtggagagcagaacccccagagctctgaatttgcttcgggttgtcagcatttggggactgcaggcaggggaatcctgggtcagtgtagatattgtacaaaaggagtggcctcagggagtatctctgtgtggatggcaagccaggcttgagttgtgacagggcccctgaagttttcttgacctttgttttagtaaaaaacaaaattgctgggtagtggtgcacgcctttaatcccagcacttgggaggcagaggcaggcagaactctgtacaagaccagcctggtctacagagctagttccaggacagccagagctacacagagaaaccctgccttgaaaaaccaaaataaatatatagaaatttaaaaatccagcttttgtgtttgtttgttggtttatccaagacagggttttcctgtgtagctttggaggctgtcctggaacctgctctatagagcaagactggtcttatacagagatccgcctgcctctgtctcccgagtgttgggattaaagacgtgtgccacccctattaacacatttaacatgcaaatgttctctctatttactgtttgtgtgtgagggggtgtgggcgccacaccacacacagaggggatggagggcaacttctaggaactggttctctccttttaccatgtaggatccaggcattgaacttgggttgtctgacttggcagcgggcacttctacctaataaatggctcttgcttttgttttgagacaggctctcactatgtagcccaggctggcctggaacttctgggtgattctcctttctctgccttctgagtgctgagatcacaggtgtgtgccaccatgcctgtctctctgtgcacagcagctctgcaggcaccaggaacacttaagtagcttgttcctcaaggctcagaaggaaagtgaaagcgaagggttaaacgataggtaagcggtgatgtggttcacaggtcaccccaggcaggctcccccagtcatcaagtgtacctccccacccccattgccccagggactgaggtagatggtgacaggagcttccagccctgtggcctccatgctgtccttcccagaccccttcagtcctattcccagacgtgtgacccctggatgcagtatatacaaaagagccacctctgactccaggtcacccccacacagtagggagtagagtgggtacggtcacccgttacagggtcgctgactcttgagatgcagttcaagtggccccaggattggtcgggggtgccagagctgtgcggctgatgtgacatttgggattgattggttctgtctgcagggaggcactgctgttgctaaccctgcacagaggtgggcagggacagacctctctggggaggaaagtgttctgggcctctctgtgttattctagtcggttagacagaagccgataaggagcctggtgtcactgtgctccccacatgcccgtcctatctgctcacccaccaagctgactcagattttctggggtgccaggtgctacaggagacactgaacctggcagtgaacagcgtactaccacactaccagatggtcattcggaggtcacagggtggcgaaagggctccaatgcataactgaaggtgctgtaaaggagagtgaggggtctgcaaggaggctccaagttttgttctggtgacaagcaatgacattaaaggtgctgtcacccagggaactcgaggactaaggacacaagcaccggaggccctgctgtgtgctcagagaggataagggagcctcagaagtgtgtaagtggtaagccaggcggtggtggcgcacgcctttaatcccagcactcgggagacagaggcaggcggatctctgtgagttcgaggccagcctagtctgcagagcatgtgccaggacaggctccaaagctacacagagaaaccctgtcttgaagaaccaaaccaaaccaaaccaaaacaaaaaagtgcatgtctctatgagtgtatgtgattatgtacagactgtgtggacttgtatgagtgtgtttatgtataggtgtgtgtgtctgtgtatcttcgtgtgaatgttgtatatgagtgtgcgtgtctaagtatataatgtggtgcagctaaatttattttagattagtttatgtgtatgagtgttttgcctgtaggcatggatgagcgccacattcatgcagtaccagatgaggccagaagagggcgacagatccctggaactggagttctagactcaagtgagtcaccatgtgggtgccaggaatggaacccaggtcctctgcaagagcaacaggtattctctttttcaagtttttgtttgtttgttttgttttttgacagggtctctctgtgtagccctgctgtcctggaactcactatgcagatcaggctggcttcaaattcacagagatccctctgcctctctgtctcccaagtgctgggactaaaagtgtgtgccaccatgcccagtgcaaggaatgcacttaacagccaagcctgggccccaggtgtcctcttcctcctgggtgtgctagtaaatgttaaatgtttcccttccggctcaagcacagcttcacaagccctttgtgttctttgcggcccctgtgtaatgaggcttggtaaggagacacacttcactggaataactcgctctgacacagacttctcacaggatttgactgggagtcgccacttaccgtggaatgcctccccttctcaagcccctgttgtcgtttcctggtcctgtgaaaggaagagacgtatagagctagggtcatggctcagtggctgagtctattgtgagcaaggctctggggcgtcgtgttcggaatattacagtcagtaattacagccaccattatttctcttcctcaaatttgtgtcccaaaagacttcagtagatacaaggaaagacacacataggataaatcgggatgtggctgaacagtacactagtaaatcatgtgcatagctaataagagacacactctgggaagtgactctggagtctgctactgagatgggctcagggggttaactgcccgcagcccctcaaccccactgtgtgtgtgtgtgtgtgtgtgtgtgtgtgtgtgtgtgtgtggtgacacaggctagcctcaaacccactgtgtaggcaaagctggtcttggcctcctggtcctgcagcttacaccacctgagtgctgggataacaggaatgttttataatctccacgttcttgccccaagcttaccaacaagatacctttgttcagggagtgcagactctgccagccctgaagcccacccctttatacccttttggatgctagagcggttgggacctactcagtcaggggacagacttggggaagaaaagctgacccaggctcgaccttcatgagatcctgggagagcgatgcagctctccaggttttctgggttttttcccctcgttgtgtttatgccgtttcctgtttgtgttttctgaccacatgttaaccacgcatcgtccctttctcttgagttttacatattattctgatgaatgtttgagctgagcagaaacatttcctgaagcaatttctcaaatctctttccaaatgtccatattaatcatgggatgatggagttggggcttccatcaagatcaaaatgtccgtctttggtttaccctgattcatgggtcctaaaatctcatccccttctctggtctcctaatgctctaatacggtgttagcaaccgctgtgttgacacaaaacaccgttcttgttcttggagatagcttattctagcccaaatataagtgatcatggcccaggacatgggttcagggtgatgagaaatgacatattctgtgtggaacaggccgtcgaacttcaacaggcacagaacaaaagaaaggcatttaaggaacatattggtggggtcatctggtaggttggttacagctgagttggagaatctttgctatgggtgatcttggctaccagccgctgatggcatgcttagctggagttggtggtttgctaagtttaaacattctggaagatttacctgctagccacaagatgttaggtcagacacagaagctggtagctgatggcttttaaggacactaaagacagggtctgcaacattccagcttccaagacttcccgtgttctggtcagtcagtcaggacacagggtcttcttcagagaattcaggccacagctttttttttttttgggggggggttataggttccccaaagaagcaaagtattttttaaggttattttattttttactttatgagtgttttgtctccatgtgtgtctgtgtattatgtgtgtacctggtgcccacagaagccaaaagagggcatcagagcccccaggatgaaattacagacggttgtgagccactgtatgggtgccaggaatcacaagaatggagccatctcttgaagcaaaggctttgaaaggtggtttctcagctgggcatggtgtcgaaggcctgtatatgtaagcacacgaaaagctgaggtagaaagattgagttgaagttcagtctagggtacacagcaagacactgtcaaaaaaaaaaaaaaaaaaaaaaaaggaaaagccaggtttggtgttacaagaatttagttccagcacttgggaggcaaagtcaggcaaatctctatgagtgagttcctggccagcctggtttacagagtgagttcaaggccagccagagctaccctgtgagactctgtctcaaaagaaaaagaaaaacaagcaagcaaaccgaaagggcacacgagttctcacctgtgtgttccttgcgatggaagtctagtacagtgagtgtgtgactttggaaacttgacgtttctctttgcttcgatggtctgtgaagacctccgtagagctattacaattcaggtaggaacagaacatcctggccgggtatggttgagagatcaggcctttcagtccctcatagcagctccctcagcgtccttagtgccggggttacaggtgctcaacactgtactgcgggacgtaattctagatatgactgtgattgcttgtggctactgaggtaaggactgttgccaactacagaagcagcctctctctctctctctctctctctctctctctctgtgtgtgtgtgtgtgtgtgtgtgtgtgtgtgtgtgcgcgcggtgtgtgtgtatgtgcgcgcgcgcatgtgtggtcagaggacaacttgcaggagtcagttctctccttccacaccaagggtacctcagatcaaaccctctgaaccacctgggctgttggacctcttttcttgaaggttccaaatggatggtgtgaatgaaggaccgagcctagcatgtgccacgtagtaagaactagaaatgaattacactgagacagagaaagagagagggtgttggcaaggggggggggggggggggggggggcctgtagcccaggttgacctctaggtgacattttttacttcttttaaaaaaaaaagattttttgtttgttttttgtttttttgagacagggtttctctgtatatctttggaagctgtcctggaactcactctgtagaccaggctggcctcgaactcacagagatccgcctgcctctgcctcccaagtgctgggattaaaggcgtgtgccaccaccacctggccaatgtgtgtgtatttttatgtgagtattttcctggcttatatgtgtatgtatactctggtgccccagagtccagaagagggcatcagattcctgggcctagacttacagacagttgtgagctgcccacatgagtgctgggaactgaactcggctctctactagatctggccagtgtccttaaccactgagccacccctccagccccctaggtcataatatctgtcattctgcttatcttaccctcttctggtccctgaactaaggagcttcctcttggtatagattagcttgaccgaccaacttcctcttcgtgtaacaaccaaggggaaactgcccagagcgggtgcaagcttggaaagaccttgcggtcttgggcagataaggtgtgactattacttttcacaaaaacagcaagtgagtctcagagagaaaagccacttaagaatctccagggggaggtgagaactcagaggagcatttgtgtcccggacaaggtttatctgttcaaaatggagttcccagatacaaatgcctgcaatcccgactactcaggaagctgaggcaggaggatgagttgaggccagtctgggaaacaagacagaattgccagtggtgctgtgcacctttaatcccagcaggcagatggatatgagctccaggccagcatggtccacatagggagaccttaccctgcccctgccccccagagagagagagagagagagaaggcaagggaggcatttatgcgataatttacagttactacagaggggacagactggaggtaatatttgatagtacttagcaccttttgtttggtttggggtaggttttttgtttgttttttgagatagtctcaggcaatccaggttgttctcaaattcattgtgcagctgaagatgaccttgaactcctgattttcctgcctccacctcctgagaactgggattaacaatgcatggcatggagcccaggttactctgtgctgggaaatcaaacccaggtctttgggcaagctaaggaaatgttctaccaactgagcaacaaccccgccctctttgcattttgagacagagtctggctttgtagtccagagctctgccaactctgattctaaggcgccgggcaacacagtccccgcccacagacctctgggtcagctgtcaacttcatctagaggcaggagcagaccgaggcctggtgccttctttcgtacgtgcgggttcacaatcaccaacaaatctgttatgtcactagggccttcaagatggtgacataggcattttatcacttctctttttcacatgtaaggtgtgccacagatgtaagtgaaattatgtcatccaccacatggcccctccctgcaggcaggacaggattcctgttgagctttcccgttttcaaaaacaagtcatgtgtcttccgttgttgtttttcccagaaagtgtcccagctcccaaacaccagcgaatatggtatcctcagtaattacacacaatttaaccccactctcaggctgcccttgaactcctaagctcatgaggtcagcctccttagtgactggaagtataggcagactccacggttatgggtccttatcagttgtgttctgaagacagggtctcattttgtagctgtgagtggcttgggactctctatgtagatcaggctgactttgaacttgcggagacctgcttgcctctaactcagtgtgctaggattaaagatgtgccctaccacatctagcctttgccagatttgtttaagtacattcccagaaataatatttctttagtaggatatgtgtatatagttcttctaattattgccaatccctcctaccatgtgcattacctcttttgcatcccaccaatgatgccctagaggtctggtccccacagctttgccagccactcttgcttacaggctttgagttttttccaatctgatttgaaggacacgatactaaagctttgtatttttgttgttgttgttgcttttttttttttttttttttctcaagatagggtttctctgtggctttggagactgtcctggaacttgctcttgcagaccaggctggtctcgaactcacagagatcggtctgcctctacctcccgagtgctgggactaaaggcgtgtgccaccaccgcccggcaagctttgtatttcttattagaagcaagacccatctctttttacgggaacatttgtttgtgtctctttactttttggagctgtacatatgtccggtgtgttagccccctgtctgtgatgtctgtttctcatctctctaggcatgaaaacctgagttccatgtctgggtctcacacagcagagggagagaaccgattcctgcaggttctcctttgaccgatacaccatcatggtatgcgtgcccctcctccaataaataaatgaaagtttttatgtagtcagatttaccagggctacagctatagcttagtggtagatcagttgcctaccgaacatgaggacttcggttgattccccacaacaaaacaagcaaacaaaacaagcaactccatattccccctcagacctgacttttcaaccacgactgtgaaaatccccactccaagccacagaggaatatactccttatctacagtgtaaagaacagattgtgtggatcccaccctttggttcactacaatgagctaattgaactttatctttctctatcagagtcccaagtttggcttgtggctcttcccttcctcccctcagcttcagtattcctggacaagatcttctcatcctggctgggctgaaactggacttgggtcaaaatcaacagaagcctgattccctgacttggctccatgtggctgtctgtttttctttcctggactctgtgctttctgtttagtgtttttccagccgttcacaggtgttctgaccttccgggcttgaggatgaggacactgaagacccatgcagggcgggactccactggaggtgggtcctgaagcccaagggtctcttccctgcttacagggttgggggatttccaggaaaagaggcttaaagtgtctctctccctctctcctactcccagctctcaagctggccacaaacttggtatgtagttgaggtgaccttaactcctgagtctcctgccgccactccttgggtgctgggatggcaggcatgaaccatcacacccttttcatatggttccaggaattgaaaccagggtcttctgtatgctagatgagcattctaccaaatgagccatgctcatcaaaacgaggcatagttgcctctaacctcagcattggggaggtagaggcacaaggaccaaggtccttctcagctacatggtaagtttgaagccagcctgcaatgcgtgaggccttgtctcagaccaaccaaccaaccaacaaacaaaacaacaacaaaacaccaaacaactaaccagcattagtaaggcatctattcttgtctgttggctggctagggttgtttccagaaaggaatggaagtttatatataaagccacacaattggtaggcagggccatgttgaaactcccacagtagcctgtgttcctacccagtgttccatctactgactaacctcactgactcagcagtgaccaccctgggttatagagacccacagccaggaagcagctgttagtggaagcctctattccattgccagcatggtgcctggaacacggtggcattccacacatatctgtggtttcccctcgttgtgtttatgccgtttcctgtttgtgttttctgaccacatgttaaccacgcatcggtgaagggtgagacctgtggatgaatccatggccccgaaggtgctcggcatttgccagatttcatggggctgaagactagatagtctcggctactgttctcctgtagcttagctaagacattttaggtacaagacttagactcctcagggtaggaataatttctattattagccaattactgacaacctggacatctagtgtgcatttcttgcttgatagtggtcttgttggttgtatttctaattttgtgtatttttttccttttctttctcctggaccatacttgatacttgttcttattatatatagttttgtattaggtttaggaccctctgatttagacaagaaggaattgttgtaggggcccattcagccaagagtctttggggaaccggcccattaaggtgtggtctcaggtgctatatgggaacagataaggggggcagaacagtgtgttctctctcctgggtggtggtcacagatctgattgcagccttcagggccccagggcagaagacctgggaggctgtctaccattgttgtatgagcattccccaaataagtatttttatccttttattcaggctttagtgggcttccctactcacccccacactcagcaggtggccaggaagcaccttggccattgattgtacagaaacggggttacatctaaagaaatgattcactgataaatgacccagactgtgctcacgttaggctcctcaggagatggggtactcttctaggatcgatgctgtggtaacacatccttacaaaaagagacttagcatgccaggcgatggtggcgcacatctttaatcccagcactcagtacttgggaggctgaggcaggcagatctctgtgagttcaaggccagcctgttctacagagtcagttccaggacacccacagctacacagagaaaccctgtcttgataagccaaaaaaatattcattttattcatttgtgggtcttttaaaaactattctacctggctggtggcacaagtctttgatcccagaacttgggaggcagagacaggaggatctctgagttagaggccagcctggtctacagagtgagttccaggacagccagggctacacagagaaatcctgtctaaaaatagccaaagcaacaagatttatttttattttctttcttggtctttcaaaacagggtttatttatttgtgtagcctgtaggcagcttagcaggttagagagtgtcctctccaagtgactcagttggtctaaacctcttagctctgctggtttctgtttcttcagggcagcgggtcagatctccagagtcatctctgcagctgggcttatttatgtgtgtgtgggggggtgactatcagcttttattgcttcctttggcagggcggggcctaatgaatctggtcagtttcagggacttcctgaagctctcttgagttgtttatcttcctgtttaaagagtctccctgaagtatacaatgtttcaatctcaggggacacttaaactataggctttcagaggtgcaccccaggtgggtcaccaaaaccatccaagccagtgccttccaaattcccaagaagaataagaaaacagtgagcagagagatgtagagttatggaggaaatgtgaggagactctccagagtgggaggggctctagggggagaacgctagtgtgctgccctgcctgaggggcttggagggagccttgcatcagggagtggatggagactggcatcatcgatttttatggtcacttttgagcacatcgcaggccgagccagttcacacatgcttcctaggcccaactggaaaagtcatcatgtcatcgttccactcagaggagagttcatggaagccaccaaagcgctcactacccatcacgtccttcactggctaagggacaccagtgtcaggacctgaattactgggctatggaaaggcaaagtgctaccccaaggttgaaaatccctgtgggattccttgtagcatctggagtcaatgtctccctccaggtattggcacccccagaattcttccctttcaccttcttctccatatgcttctcctcactccctccaaatatttccagtcacaaccatcaacacttttctttccatatttttctcctttttttccacaccaacatctttgtcccctccctcccccgcccctccccaggactccactatgtagtcgaggctggtcttaaactgaaaagcaatcctccagccccatgagcctcctgagtgttgggatcgtggacccatggccccacccagcttttctttggaggtattggcttcctccacactctcacccaggtccggtcctcacttttcttctttgcaagagcttttttttgttgttgctttttttttgttttgttttgttttgttttcgagacagggtttctctgggtagctttggaggctgtcctggcactcactctggagaccaggctgtcctcgaactcgcagagatcctcctggctcttcctcctgagtgctgggattaaaggtgtgtaccaccactgcccagcttgaaagataaagttcattttctacccattcccccatttctttatccaaaggtgggcaagcagggttggcgaggaccttgtatgcagagatgcaaccctggatggctgggagctccaggtgtggtgagagaccctgtgtcaaagcatagaggaagacacctgacatgacctctggcctacacacacacacatacacacacacacacacacacacacacacacacacacacgtgggctcctgcacacacacgtgtgcctgcaatcaggaacacacgcacacacacacacacacacacacacacacacacacaccacatagacacatgcaaaggaaagggggaatggatgctggatctgctgtcccccacccccagggctcccttccctgctccagggtcacagggggctaactctcaaagagcctagactttgctgtgtttactaacttttgggagggtggtcacataaacttccttgaactccatccatcagactttggttgcttaactccacgtttcctgtttattttctgggtttccaggatgcaatttgcatgtaattcaggaactgtgaatagtaagggtcccttgcacttgccaactggcctaatttttaggaatgacaattgttagtgaaacattcagaggctttgaatggatgggctccctgccgtgtgtgagcctgtgcccccacatcacagaaggggcagagagagggccagactctccacaccccttcctcttctttcccatgtgttttcatgtttcttttcttttgttttgtttttgctttcatgtttcaaaggtgccccaaccaataacaaaggccgccaggaggattggatcagtgccattctgcccatgaacttcagcagagtctggcaaacagggctgaatgcctgcctgaactcggcttcttggtcaggtcatgggctgcctgcccacaggaaggaaggagcccccatttccagctcacataaaagcatgaaagtggctccttgttgttaagctcttgtctgtctgccagctgccggtgccagcacggacactcgctgtgtaactgtctctgtctgtctggagcctcacgtatgataagccaagtgttcaacctcttagctaacaccctgccgctcagtagggtgtggtggtcccctcctgtaatccttatactctggaagcagaaacaggaggattgtcacaggtcattgcattatttttttggttttggttgtggattattgaggcatagtcttgtgtagcccagactgacctcaaactactgtgtagctaggacaggccatgaatgcctggtcctcctgccttcacctctcaatcgctgtaattacaaagcaactgatacaaagggactctgactgaggtagggccacaaagtgagacggcggggagaaaaaatgcagcaacacagcccgttacgataaccacaaagatatatatataaaactttttttggtttttcgaaacagggtttctctgtggctttggagcctgtcctggaactaactcttgtagaccaggctggccttgaactcacagagatctgcctgcctctgcctctcgagtgctgggattaaagttgtgtacctggcctatgtattaatttattaaaggatgctatggggaaaacagactcaggaatatagaacaaaatataaccagttataaagtccttccactctgcccaagggagctgggaacggaccacatgctgttcacaccagtgtcttcacaacaggagagaacacacatcctcggcctagtctgtctccttttaagagatcatgtccacaggcaagaagtcacgccctaaggccggtgccccaaagctattggtggagtgaattctcacaacaaagacagacaccccaacactctcttgctctcagtaggcataccctgacttttcctggaagctgttgtctcttggggcgttactgaatatccccttcttacttttttttcccagtgtttcagatgacccagttgtgttggctggttttgtcaacttggcacaagctatagtcattttgggaagagagccttgatgagaaaacacctccatgactggtaggttattgccttgatgagtgattgatgtgggcggggccagctccctgggggtgaaataagttgaggacacagcttattcctttgagacagaagttctctgctgagtatctagttaggggcgctgggaacattccagcccagctcacacagcccatgtatgtgcttctgcaggtgtgtaccctcggtctccctcactttaactttcggtgggatgtgacattttctgacgctggtgccaacttttgtggagccctgtgcacctgcatcgcaactggcaacctgagtcttaggactgaatgaaacaaatgtgtcttaaattatgatccaaatagggactgggagcctcacacttagtggcagagtactggtcaaccaagcatgaggccctaggttcaatcttttgtgcagaaaaccaaagacacggggtgttattctgaggaagtggttgagtggttgagagcttgtatttgctgctactgtaggggccacaagttcaatccttagcacccacttaggtggggtagcttaaaaccacctgtaactccagctccagggggatccggcacctctggcctccacacacacataattaaaataataaaaataaatccttaaaacaacctaatgtaggctatggtggcacatgtctataatttcagcatttgagaacggagcagaggctcgaagttcaagatcacctgggctatgtggtatgttttaggctggcctgagctatgtaaaaccctaattccaaaaacaaacgaaaaacaacccaacaacaacaaccaaccaaaaataatacctgcagggcagttggaagaatgtgtggaagccacatggaaagccctagtcggtttccagtagcaaataaaaccaggtgtggtggtgcccagctgtaatcacggcaccgtggaggaggcagaggtgttaggataaagctcgggggaccttggtggattccatggcaggagagggtgacccaggtggagggacaaacacgccaggcagacagggcttaagtgagttttattagaaagggaagggaggggaaagggaagaggaaagagggagggagagagagaagaaaggagagagagagagagagagagagagagaacagaagagaagaaggagacaggaaaagcctgtctgctctagggaaagcgagcaggaaggagacagagggaaaagacctagaaagagaggagccggaaagagggcataagtgggcagaggtttttcttttaaaggggtcctttgcacctgggctgaccagagtactgcctgagtgcattctgccaggtgacaggggcaggccagtacaatgcctgaatccttacaggcagagcatgcatttgagaacagcttggagaacagacttataaaaggacaaaacccccaacacaaacaactggttaagagcacttactgctcttgcacagaggacctgggtttggttgccagcattgaggttgtattttacaaccatctgtgactccagttctaagagatctacttccctcttctggcctccagggacaccaggcccatacgtggtgcatatatacatatgcaggcaaaatgctcatacatgtgaaaaattaaaaaacaaaatttagggctagtgagatgactcaccagagtgctaactgaacaagccggatgacatccgttcgaacaccagaaccccacgtcttagtgttctacagctgggaagagaccatgaccaagacaactcttataaaggaaaacattgaattggggctggtttacagtttcagagttttatccattatcagcgtggcaggaagcatggtttcgtgcaggcaggcatgatgcttgagagcagcagagagacctacatctctattggcaggaagcaagaatgagccactgggcctggcttgggcttctgaaacctcaaagcccacccctggtgacacacttcctctaataaggctacatctaccccaacaagaccacgagtcccaatcctttcaaataatgccactccctgagagggctatgggggacattgtcattcaaaccaccaagtaaaagtggaagaagagagacaacccacaaagttgtctctggcctttacacaatctgtgtctactccatcatgaaaacgcacattgtcagtcaggcggtggtggtgcatgcttttagtcccagcactcgggaggcagaggcaggcagatctctgtgagttcgagatcagcctggtctacaagagctagttccaggacaccctccaaagccacagagaaaccctgtctcaaaaacaaaacaaaaaaactcccacacattgtcatcattaaaaaagagttacaaaaacaacaaaaagccctactataaaataaataacaccatataaggaaagtacttaacaggtagtatagtggtgaaaaaaagacaaaagttatcagttatttaacattgattcttaattttcaacagcttcatagacgtacatataatgtattgtgatcatattcacccgttaccttctcttatctcctcccacacaccccttcttcctggctttcctcctcctttcatatcttgtgtgtgttggtgatcagagccgctgtgtgctcatgattacaatggccataccgtctccagaatactgatctcacagcatccttcctggtcctccatcctccatcccctctctcacactgtgtctcctttagggcagactgcaatgaaatatccaccccgcccacacctgtagcactgaccacgcccatttgggcacggtcactggtgaggatgtgttgaggagagagtttaggtctggggtctgggcaggtggctctctcttgcagcctgattggatccgtagagtggccatctgcttcttttataagtgacttctcccccaaataaattatatttaacctatatttgagcctggtcctgtaaatcattatccgtacctccacagcagaccatccaataatcccttaatctcagcacttggcctagttatgggtctctgctttaactgttgccccctgctgaaaaagattcctctggttaaggcagagtgcagcaagcttttttgttggctgccagttcacaaataacgacccagaaatttattaattatgaatgctcggccctagcttaggtgtgtccctcttgctcttacaactgaaatcaacagctttatattgatctaccttttgtctctttatattgatctctaccttttggcttttacctgtctgtttgcccggctccctccatgcctcattggcatcccacgaatgcctagattcatcttctacttcctctctctcttcccagaagccccacctatacctcctgcctagctattcaccgttcagttctttataaatcagtcacagcctttcagctctttattaatccaatcacagcaatatatcttcacacagtgtacaactatcccacaacagataagagctgaactagtctattagaatgaacataaatatttagaaggcagttttactacctagccatttagcaaaacatctatgatggcttttcccctgttgcctgtgacctccccaaccacaggattttacccaggtttacagcactaggtgtttatttcctcttgtggaatccaagaagagagtggctggttacaccccagtaggtctgtactgtggcactcggagtccacatctgggaaagagcattggtgagctttcctccttaataagacgcatgcatagccccttctggcgctgtgaatgccagccagcagaaggatgcttccagtccagttccagcatcgtttctctgtgtctagtggagcgtgagatgtcttcagcaatagagtcttactgtttggttctgatgggcaagcaagagcagtgtccacagcctgaactgtcttgggggcctttgagggttccctggttagcaacccatagaaaagtatcccacacctaaaagtgggaattttggctttaaaacctgtatctgtgggagcatcaggcacctttgttgggtatctctctttaagctttttattgatttacttgtttttttccagttagcttataaaggagtaggttagtattcggcttcttcagatacctttcccccaacatacacctttctcctacaccctgatcccattccaggttaaaactttccaccctggaccccatctacaagccaccggagttatctaatgcgtctcacagcagagctcacggtctgacacatcagattaagccacagtcattgtgttgtctcagggaacagttattagagccctggtgcccacacaagggtcattgtattgtgtggtttgcagatgtgtggtcgtggaaagaactcgggctcggtgttatggaacggtggaatccctgctgcattgtctcatgacctgaggcggtgaaacagcccactctttacctatcattcatctgctgnnnnnnnnnnnngagaaatgctgagataagtgcgcgtggctgctcccccaagggcggcttgctgggtttcaccgcctcctcagcgacgactgttgtttctcagcagcctcctcggtcttctcaggcctctggtacctgagctggtccagaggcagaagtcaccctgaagcgtgactcctgagagtggagtggctatctggtacccaccaagcacaaagaggtgtgacgtcctcaagtagggaacttcttgttgttgtggtgacttctcagggaccgtggtgacttctcaggggctctaccagctccagattgccgtttccatcttcctttttttgggggggcgggggttgggtgttcgagacagggtttctctgtggcttttggaggcggtcctggaactggctcttgtagaccaggctggtctcgaactcacagagatcctcctgcctctgcctccccagttctgggattaaaggtgtgcgccaccaaacctaaaattttaattatttctattttttgaaatggggtctcttgtagccatggcttgcctcaaaactgatatgtagcccaggattaccttgaacacattatcttgttcccacatctcaagtgctgggattgtaggtgtcttccaccatgccttgtttaaaataagtgctggtgattgaacccaggatgttctgcatgctaggcaaacactcaacctgttaatccacacccccagctcctcttccctgcttatcaataagcaagagactgaaactacttttgtgagcttagttctgggattctaggaaatccccaaggggtttgcagtggtgagttgcttgtcagcatttctctacaactttcataggttgtctctttatctgtagactttctgttgagtatgagtagagtgttgctccctttagccttaggggatccaggttaggacagacttgcttttcttcttcttcttcttcttcttcttcttcttcttcttcttcttcttcttcttcttcgagattttatttatttattatgtatacaacattctgcttccatgtatatctgcacaccagacaagggcaccagatatcataacagatggttgttgggacttgaactcaggtccttgggaagagtagctgatgctctccatctctgagccatctttccagccccctgtttttttttgttgttgttgttgtttgttttttggatacagagtctaatgaaatgcaagctttccctagattcactgtatagctgagactggctggattcctgagactcctgcctccacctccatggaactgggcctataaacaagagtcttgattctgcccagtgatttccaacaaacagtacctcaaggaatatagtcttaaactttactttgctcttccaaattcaagatgaatgtcatacatagcccttgatgggtttcatcaggaggtgagcgtctctgccatgtgatgtagtctgcatctgagagctcagaggagagacaggaggacatctgcagtgtgacctgggtcattactgtacacaatcaagactcacatttcaccactgctgctatttcaaagttcttatcggataatggggaacaaagagggaagaaagagagattcattgcaaggatatttagggaactcacaaatgcttttgtatgttatttttcttttctgttaattaaaaatatcagaatcaggtatggtaggtggagacaggaactcagagctagccttagctacatagcaagtcctaggtcaggctagactacatgagagtgtctgaaaaaatactcagcctgtcgtttggctcttgccacggaccatggagtctgtgtatcagcctgcctgcagctttggttaaacgactatttgataagttatccctgtctaattgtcttcttttttctttgttgaggaggtgtcctgctaaagatgaccctgaactcccgattgagctttctcccaatcacagcgtcactaccaccttgttggtctgtgatagagaggtatcacacacaagaccagcccatctgcatccccagcccctgccatccgtcaccagggctgggtggccagccaacacctgccactagatggcagtgtatgtgtaggtggggaaaagccaacgccatcataggtgagatttaaatttattttatttatttatttattttggtttttcaagacagggtttctctgtggctttggaggctgttctggaactcgctcttgtagaccaggctggtctcaaactcacagagatccgcctgcctctgcttccagagtgctggaactaaaggcgtgcaccatcatcgcccggcaagtttcaatgtttttaaacttattttcagtaagttataattgaatacctgctatgaactgaggaagggtggcaaaggatatggaggaaatgtaactcggatctataatttttacttgtatcatggtttatcttgtttacaatttgcgtttgcccataagttctgcctggtttttgtttttagttctaggacaggctccaaagctgcacagggaaaccctgtctcgaaaagccaaaataaataataaataaaaagaaataaaataggagagtcagggtgcctcactcctttcccagctcctggtagtcagaaagcagtgtaaaacatttgtttctctaatcttcattattacagcatactaaaaatcttgtattgaagtttatgatttgccctatttggtgtgatgacaacttgcaaagcataatttaaacacaattagaagctaattgaaaatagaggttgattgtaaattttttaaaaactgtgaacccccaaggctgatagcagcgtcttttttggtgggcattgtctttcttagggagacagtatcgatgggttcctgggccaccagcaccatccaacccacgatgatggtgagacaaaaagagactgagtctgagccacggcttgtccacggggctgggggcagtggtgcagcctttcctgatgtttccttgtagtaatatttttttcttggctttaaagaagtaaatgctggcttgtaagaggcccacacaggtagcctctaagagctgagcagccggcaagaaaatagggtcttagagtccatagctccaggcgactgaacttcggccatggccagaacgaacttggaaaacacaagccctggacagattcagcatcagctgggcttggtgggtcacaagagtaatccaagaacttgggaggcggggataattgagagttcaaggccagccatagctacatggtaaatgtgaggccagtctgggctgcatgagaccctgcccccacccccaaaaaaagaacttggcgttattgatttcagcctgtgataaccaaaacacgatgaccttgtcacactgtacacaagtgtcccatcctcagaacctgggaggcaacaaatgagatatcacattttatcttctcaaagcagactagccaaatattatgttaacattcccccagccctggccttgtccctccctagtctccccgggtattcccattgcagtagaatttgaccttggctctaagtaaagttccttgctattgtttttttgcttattttgtaattttttgatgaaactcttctaatatgccaccatcatctcctgcttactgctatttctctgtgagatttgatctgtccttaggtcaccccaggagcccttgcattccctggaaactctcactgctcagtgacagaggccttctggaactccggctgccagtctgtgcttgtgttagccctaacccccacccatcctctaaggcgaggggagccagttccccgcctccaccagcctctaaggcagggatttgtgcccttgcactgggactgtgcttggccttgtccataattactcattaaattcaactaaaggttgcaatgtggggagaggtgacagatatatagccagtacaatgaattaaataacatggagataatatcccctggggtatggctcctgcatctagcaggtctaggcctggggatgaaaggtatggctaagacccacctgctccaggactcataaaggagctataagacaaactccagcaggggcctttcatcacctatcatgaggaaactctgaataattttcctagggacccattgagtcagagctcacacctagttaggcaaggagtgggtgtagccaggtgactgttttcttggtctcaacacccaaacatccaactatttgtggaccagtaagggaagtcccctatagtcagtaccctgacactctctaggttctctcttgcacaagcagggacaggcaggttagttgccgaagccggaggctccaaggatcccttcagttctcacactgtaaaggagttagctggcttctctcagggagatacagaattcactgtcctgctgtcctgggcctggagatccccacagccccgttagatatgaggaagttggggagagaaagaggggccacagggatggctgggtggttaacattgctctctgctcttgaggaagaccaaagttggtttcccagctgctaggagccagagagtcttctcaggcttccaatagccctacataaacccacgtgcaaacacatagccttaagaatttagaagttgggggctgtagagatggctcagaggttaagagcactgattgctcttccagaggtcctgagttcaattcctagtaaccacatggtggctcacaaccatctataatgggatctggtgccctctctgacaggcaggcacacatgcagaagaagactgtatacacactaaataagtacatacattaaaacaaaaaaagaaagaaattaaaagttgcagggtggtggtggctcacgcctttaatcccagcacttgggaggcagaggcaggtgaatctctgtgagttcgagacctggtttacaaagtgagttccaggacagctttcaaagctacacagagaaaccctgtctcgaaaaacaaaaaagaaaagaaaaggaattaaaagttgggttgggggctggagagatggctcagcagttaagagcactgactattcttccagaggtcctgagttcaattcccagcaaccacattggctcacaaccaccttgaatgagatctggtgccctctgctggcatgcaggcagaagactgtatacataacaaataaataaaatcttaaaaaaaaaaaaaaagtttggttggagagatggctaggtggttaagagcactggctggacacaggttcagttgccagcacccacatggcagctcacaaccaccagttccaggagaaccaatgcttcgcttctcttctcttctccacaggcatggaatgcacactgtatacaacatacaggcaggcagaacactcacacatatgaaataaaaaggaagtgaaagttttgtttaatttttaagtgtgtatgtatctctctctctctctctctccccccccctctctctctctctctctctctctctgtgtgtgtgtgtgtgtgtgtgtgtgtgtgtgtgtgtagttgcccacggaggccaaaggtattgaatacccctggagctggagttaaagatggttgtccgatgtcagacatggatgctgggaaccaaaacctttagaataaaaaaagcaatacatgcatatatgctctccaccattgagccatctctctggctccaagaggtgttttgttttgtgaaacatagagagggagggtgttattcttttgtttaaaaagaagaaaagagaaatgctgagatatgagacataagactataagtttattataaggcccagcagaatagggagactaagaagaggaacaggggtaaatggctgaccgccatggccggtcgccatagagagagcgcataggtgagagtagagaggaagctaagaggaaacagagcgggaaacagagaggggaacagagagagggaacagagagagggaagagagagggaatagagcgagggaacagagagtgtaaatgggcaggagcctatcttttaaaggggtcctctgcacctgcgtgcagacttctttcccatggaaccttgggctgaccagggtattgcctgagtggattccaccaggtaacaggggcaggccagcataatgcctgaacctttcaaatagttctttctccctgagtgtagatttggttttaccagatgttataggcacctgatgtcttgagttcacctttatggaggactgtactcttgtttgttgagccaaaataaatcctctatcctttaagttgctttaaagggtattttatcacaagagtaagaaaagaaacttaaactattattaatactattattaatactatcaccttaaataaaaatactatttttcctttcatctttctttattcaagctcattgtttcatttgtttcttgctccaatattaatgagaatgtcacagtgtaataactcaatagagaaaattatatataagcataatgagataataaagtaagatactacattaggatctggagagatggctcaggcataaccagcacttgttcttgaaaaggataagagttcaagtaacagtagccatatagtggcttacacgtctttaaataaactttcagaggttctaatgccatctgatgacatccttggacagaaagcatgtaaaaagcattaacattttaaaacagacagatttttttttggacaatgaaaagcatcttaatcttgaccttgtnnnnnnnnnnnnnnnnnnnnnnnnnnnnnnnnnnnnnnnnnnnnnnnnnnnnnnnnnnnnnnnnnnnnnnnnnnnnnnnnnnnnnnnnnnnnnnnnnnnnnnnnnnnnnnnnnnnnnnnnnnnnnnnnnnnnnnnnnnnnnnnnnnnnnnnnnnnnnnnnnnnnnnnnnnnnnnnnnnnnnnnnnnnnnnnnnnnnnnnnnnnnnnnnnnnnnnnnnnnnnnnnnnnnnnnnnnnnnnnnnnnnnnnnnnnnnnnnnnnnnnnnnnnnnnnnnnnnnnnnnnnnnnnnnnnnnnnnnnnnnnnnnnnnnnnnnnnnnnnnnnnnnnnnnnnnnnnnnnnnnnnnnnnnnnnnnnnnnnnnnnnnnnnnnnnnnnnnnnnnnnnnnnnnnnnnnnnnnnnnnnnnnnnnnnnnnnnnnnnnnnnnnnnnnnnnnnnnnnnnnnnnnnnnnnnnnnnnnnnnnnnnnnnnnnnnnnnnnnnnnnnnnnnnnnnnnnnnnnnnnnnnnnnnnnnnnnnnnnnnnnnnnnnnnnnnnnnnnnnnnnnnnnnnnnnnnnnnnnnnnnnnnnnnnnnnnnnnnnnnnnnnnnnnnnnnnnnnnnnnnnnnnnnnnnnnnnnnnnnnnnnnnnnnnnnnnnnnnnnnnnnnnnnnnnnnnnnnnnnnnnnnnnnnnnnnnnnnnnnnnnnnnnnnnnnnnnnnnnnnnnnnnnnnnnnnnnnnnnnnnnnnnnnnnnnnnnnnnnnnnnnnnnnnnnnnnnnnnnnnnnnnnnnnnnnnnnnnnnnnnnnnnnnnnnnnnnnnnnnnnnnnnnnnnnnnnnnnnngcaaaaagatctggcagaaataaaaaatctggtagacaggtttgctggcacaggccgctggagtgggcgtgcctacaggtaggtcacatgaccaaaacgtcggggaccgtaagccgcttttgtctgtttacctgcttgttggataaaaccagaaaggttcctctatgcatttcccatgggtgaggcaagtggaaaaccagcaaaaagctcctctccggatgcacgtcttcccgtgggagttgccaggggcctggccccgaaggggacacagctgtcccgaaaccgaaaaaggacccagcggtctgaactgaaaaagcaaaaaagcaccgctcctggagcgggatcccatgcctgaccttcaggaaatgcacccaacaagtgaaagaagaaataaaaagcaagatgtcaggtggcagtgcttgcctgtgtaagtcgttgaagtgagtgggcaggcctaagctaggtcacctggttatgaccaagatggcggcccccaggttagcccacgttgggcgccaaaatgttattcttttgtttaaaaagaagaaaagagaaatgctgagacatgagacataagactataactaagaagaggaacaggggtaaatggctgactgccatggccggtcgccatagagagagcacataggagagagagagagagtagaaaggaagctgagagggaacagagagcacagagagcgtcaatgggcaggggcctatcttttaaaagggtcctctgcatctgcttgcagacttagttcccgtggaaccttgggctgaccagggtactgcctgttccaccaggtaacaggggcaggccagcataatgcttgaacctttcagagggaaggaaggggagagagacagagagagaaggggggagagggagggagggagaggagggggatggaaagcttggaagggctgcagaacagagatgaaagtcattatgtaaatgggattcaccgtggcagctggagaggtcgaggtgtgagggcagacagcggaccaacggaggatggagcccggcactcgttgtgggaatgaagagagcagagagagagagagagagagagagagagagagagagagagagcattagcacaatggatggcagtggtttatgatactgtgtatcagtatcaatgtttcagtagggggaagggatggcatggtgtaataaaagtgggttgtgggtggatctgaggtgtgccagagaggaaagagaagtactcgagagtgtgacagacacggacatgttcctgtctgggaaaagtagttagcctggaacaagagagactcctgaggctgaaaactctgatgagtctaatgtggtttgggaggcatcaaagaggcccagtgccttcggttgggcagcccaaggcctgcctgatgtcctcggttgcatggccaacaatctgcctgatggcttcattcctgttactgtgagaaaaataccctgacaaaagcaacttggaaagaatgtttattttagttcacagatccaggttgcagcccatcatagcagggaagtcacagagggaggaacttgagagaagtggtcacatcacatccataaccaggaagagagacagccaggatctcctgcctagggaacggtgtggcccacagtggtcaggtcttctcatcgaataataagactaacatgcctactggccagcctgatctaaacaatccctcacttaagctcctcccacaagcgtgcctatgggccagcctaatctaaatccctcacttggctctcctcccaggtgattgtagactgtgtccagttgtcagctaatgctaactgtcacaggatggcccacccttggaatcctgaagcagggatctttgggatcaaggtgggaagggtgctctctgtcccattctgggtgaagctttactgcaggtgacaaacccataaagccaggccacgagggaagagggaagactggcctccctcctgttgggatgagagaatccaatcggtatttctccatgctaccgtcctgacgtgtgccgtgtatccacaggttatgcccaggcttggtgccccatacctgtaatcccaacacttgggaagtagaggcagacaaccagaagtttgttggccttggctacacagtaagtttgaggctagcctgggctacatgagactctcatctaaaagaaaaaaaaaaaaaaggaacaagacaaggccgggcaggactctgctcctccacagttcctcctgggtgtagctcccttgcccatttccctatttgcttcagaggggtggaagtggggtgtcatgggaagtgtgccggttagttcttttgtcaacttgacacaaacagggatcatctaggaagagggaacctcaattgagaaaatgatcctaccagattggcctgcgggcaagtccacaccgaagtttccagcccatagtgagcggtgccacccacggccatgtggtcctgagctgtctaaggaagcaggctgggcagccagccatggggagccagtcagtaggcagtgttcctccctggcctcagcttcagatttcctgcctcgatgtccctctgtgacggactccaactgtatgatgaaataaaccctttcctcctcgggtggtttttggttatggtgtttattacagcaataagaatctaaacaggcagagcattggtggctcacgcctttaatcccagcactcgggaggcagaggcaggcggatgtctgtgagttcgaggccagcctggtctccagagtgagtgccaggataggctccaaagctacacagagaaaccctgtctcaaaaaacaaagaaacaaaagaatctaaacggagacagcagaccacagtgaagggtagagcccttaatctcccatactgcctcatcctatctatctagaggccctcagtatgaaataacgctggcgtgacttgtccttgttgagctcctagcgccccctggtggccacatgcattgttttttgttttgatactatgtagccaggactgctgccctgaatcttgtgtttctcatgccctccagtctcccaagcgctgggacaacaggtgcacacctccatgccctgatacattttggatctcatttgaaggttgccacagtcacactaagcccacctccacccctccccacccccggcctgtcctctgttttctgtctgttgtatgggactatgctcgtggggagttcagctgttgccctttgcagaaggatcgtcccagccgagcctgtgtattgcccatggaggggtggggtcaggagaccctcacctgggtatccaactgtctcgattgctcgtgccctgggggcgggaactagagtatataggccaggaaaagctgtgaggcggggcatccgttttgcatctggctatggagaagaagccttcgtcatcacaggtgggtaaaggtttttccaggggcggcctgttgcgggaagagcacccacacttctgtaagtaacccctcacccgtgctctgtcgggaggccattggttgcccagagtaaaccttgggggagctgtgtctgtcattggaccagggaagaggggtcgaccttgggaagtcaaagctctgctccccgcagcttcccattgctctcctgcctcttcacggttccacggtgatcactggtggtcactggtgacccagggtcagttctggcttgggtacttgtggagaacacctgtggacattctttcctggggtcgtgctgtgattccccaccgttcaccgttttccagtcagataccacgcttctctgagggctcaaggctgatcagtctcgcacctgaagacaatgaaccatggagtgtgaggaaaagcccctctctcttttctttatatttaatgatgtatatctgtctgtttctgtgtggcacatttgagtgctggaagggcccatagacgccgcaggaccctggagctggagttataggtagttatgagctgtcgctgtgggcgttggaaattcatccgattctctgaaagggttgcagatgctctaaaactctgagccatccctcaggcccctttccttttaaaatcagggtctcatgtagctcaggatatagcttagaccagtggttcccaaccttcctaacgcggcgaccctttaatacagttcctcgtttttggagacccccccaaccacaaaattattttcattgctatttcataaccttatgaatgaattcatatgttatgaattgtaatgtaaatctctgtgtttcccagtggtcttaggtgacctctatgaaccactggcttagatgatcttaaactctagatcctcctacctccacatgctgggattgcaggtgtgggccgtggtgtctggtttacacagtgcgagggatagaacccagggctccctgcatgtgaggtaagcgctcccatctatgctacagtcccaggctcttttcatagccgatttcgttcatggcaagacccagcttcctcactttttccacccagcatctagacaggaacacggctaatgccttgtaacgcttcccgatgtggggagtgctggatgctgatgggaaagggagtgactctaaaacaacacattagtattttcccttgtggcaaagtccctgctcaagcaagggaagagcgaattgtatcggtctaatttattgcggccgctagagggcagcactgagtcaaggctcagactaaagaaactgaccaccagagaagcacattccagcgcctgttctcggcgccttggcatttcggtgtgggtttctgtccatcacggtgcagcggtgagggttgaaatcctttccttggtgggcattatggtgcgcgtctatgattccggcagcccggaggccaagcaaggaagagtccaaagtgagttccagacagtttgtgtccagttcggacaatttagcagaccctgtctcaaaataaaaagtgaacaaaagggctggagaactggttcagggatgtactgctctttcagaggacccgggtttggttcccagcacgctcatatcaaactctaggggcatttgatgcctctggcctccacagcggcctgcactctcatgcatggacatacgcacacacacacacacacacataattaaatatgcacataattaaaatcataaaaataaggccgggcgggggtggctctcacctttaactccagcactcaggaggcagaggcaggtggatctttgagttggagcccagcctggtctacagagtgagttccaggacagccggagctacacagagnnnnnnnnnnnnnnnnnnnnnnnnnnnnnnnnnnnnnataaataaataaataaataaataaatatttaaaaagtgaaattaaaggggctggagagccaggggtggtggcacacacctgtgatcccagcacttgggagaaaaagagagggcctatttgagttggggggcagtctggtctacacagcaaattccaggcctgccagaactggatacatagtgaaacactgtctcaaagcaaaagcaaggtcggtgggatgagagggtgggtactggttggagctaaagctcagtgttgaaaggctgtcggttgtttagcatgaattaggccatgggttcaacctccagcagtgctaccaatacatggttaggggtcaggaggggtgaaggnnnnnnnnnnnnnnnnnnnncagcaggaaaaggtgctttcggctaggctaagctagatgatccgagttcaatcccagaatgcatagggcagaaagagagaactgactgctgaacactcagatctctacgcttgagctgtgtgtggcgcatgcccagtagagggtgtcagattgcccgcagctggagttacaggtgggtgtgagccatcagacatgggtgctgggaatggagcttgtatcctctggaagaatagcctgtgctcttaaccttcccgccatctctccagcccctaagacattttcttttactaaaataaccttttaaagttaagtaataaatctttctctgaggctctctattctaaggaccacccttgcttgctgctcaagtataaaaagccccctggaagaggaaagatgagctattgatggctgtgagctgactgtcaccgtttggccctacttggctaggaattgtgcataggcaggcggaagctcatccagaactagcaaccccagcccttgggtgcccagggcttagaacctattgctccaggcattagaagccagaacctagggctgcaaaccctcaggccagagctttgctgctctgcactttaacccctgacatttagcagcttccataagcctctgcttcctgatgcagctgccagtgcttcgacagggtctctctgtgtagccctggctgtcctagaacctgctctgtagaccaggctggcctcacactcacagagatctgcctgcctctgtctcccgagtgctgggattaaaggcgagcaccaccaagagttggtgctgcggctcttgaagcagccttgtgtgtaggaacctgggttttatgggagcagagttgcagctctggcggctgagtgttgggactcccttgtcaccgacagcagctagtatttataacccctgggcctcagtaccaggaccctcaatccttccagctcctcagctcctttgaacgctcatggtgaccagggccccccgtttctcttctgtggctccccacagtctctttctccagccttgttctcttcttccaaggccactcattcctagttgctgtggaagtggccattgccacccctactgctgctgctgccaggagggcatctcctcaccgacccaagaattgagtcggaagttggatgtggtgacacaaaatagcttactcggctgcttgttggcagtccttcagtgaagataaggggacaccagagaaggacccgacagctgtcatgtagggggtcaagtcaccccaatatcttagcatatttaaagggaaaataaggtctaccattaatcccaactgggttttttctttctttccttctttctttctttctttctttctttctttctttctttttaagtcacattttcccaactgtttctttttgtgcatgtggtggtcaaaggatcagtgagttctccggcttggtggcaaatgcctttacccctgagtcatctggatggccctctagagctctttaatggtgtttaaattgccttaaggatgcttagcttctactctagtgccccaggcacaggtgggtccctaatctgtcctaacctttctttgctctgaacttgtctctactaaatcgtgaatggagtgaagagggcaatgtccataccatagcctgtgaaaagtgcggactgtcttacgggagtctaagggtgagtggaattgacccctgagtgtcagccagctccttctggttacacatgacacagtttagtgtgagtcaggtgtgggttatgtcaagaaggacactgagggaataaacacctctaaaggttttctgcttctatgtggtctatagtgagttccaggccagccagaccatatagtgagaacgtgtgtgtgtttgtgtgtgtgtgtgtgtgtgtgtgtgagagagagagagagagagagagagagagagagagagagcattttgcctgcatgtatacagcctgtggaggccagaagagggcattggatcccctggaattgaagttacatccagcacgtgggtgatgggaactgaaccagggtcttctgaagagtagccagtgctctaactattgggacatctctccagttcatttgttgaccttaacatcctgtctaaggtgttttgagaacaacacaaattacctctcagacatttgggctttatcttgactctcagctggaagtggcaaactagatcccagtatatggggcctcattccttcccccagggcccctcatttccctgtctttattttttaaattttgttttatgcacaggggtgtatcgtattcgtacgggtgctatgtggcaggcatgtctgtgtgctaacttgtgtggcccccagagtccagaagagtctttgtttcctctcatgcatcctgccatatcttgtagaataaggatcctattgttgtcccactctttcaccataagacactcaaccctgggaagggaacagtcaccaggacccttctgaagggctggcatcggcctgtgcctgtcccagactcaggtgaagcagcttggctgggactactggctcactcaggcagcttggaagcatctctcagggcaactgttctgtagcacagtgtctggaccacactgtgtctggaccacactttctccatttcatgattgcctcccatcactctctggtgatgggacctgaactgtgtccttacatacatatgagagccctttgcaaacagacattacaattttccccaaagggccccccataggcaatgtgcaaaggattccctgaaccacaggaggtggggacaaaagctgtcaaaagttgctctgtagaagagagggctaatggccagacatcattaagtaggttgctacctgtctctgagctttatttcagtgagagatggcaatagcaaccatggctgccgtgaagtttcctcaaggtgtccgtggagggctgccaggaagcaagggactgcctggctgacagtgagagaggcagctcggggtgccaaagctgccagctgccagctctcccagaaattcaacacagtttgccgaacactcagcaccgttctagagttgggcgagcgagaaagtacatgcctgaaaccccagcacatggaaactggagacccataactacatagggagttagaggcccacctggacttcctgagatactctttcaaaacaacaaaatcacccaacacttagaactagtgattttttttttcctattgatttgtctctggactagggtgccactttgtgcccgtcttggaggtcagaggatcacttttgggagttagttctctatttcctccctgtggcctctcggggtcaccaaatctgatggtaagtgccaagccatctgacagcccagaaccaataatcctaactgtagtaaacttgctcaattgggctcaaccctgctcggtccccaggtaatcgtctctcctaaattgtttattgaatactctttcggtcctgttgtgttttctcacaacagtgttttgttgtttttttgtttttttgggttttttttggtgtgtgtgtgggggggggttgttttactgtgctgctctgggatcaaaggtgtgtacctccgggtctggttgtcccattgtttttcctcccttcctccctcccttcctccctcccttccttccttcctttctctttctttctttctttctttctttctttctttctttctttttttgggtttaagaatcagggtttctctgtgtagcttttggaacctgtcctggaactcgctctgtagaccaggctggtctcgaactcacagagttccacctgtctctgcctcccacatgctgggactaaaagcgtgcaccgctaccgtctagctctattgtttttctatggcacctctctgcctggctttttattccacagccacttgtttgaaatgagcatcatatcctagtaatcttttccaggtgactaagtctttcccaccgttgttttcctatgtctccaacgctgcgtctgactccggccttcacagtcgatgttggggggtcagctgctaatttctgcctacatggcaagaccagtttccaggttcccccttttcctctctgctctccttttcctcctctctgtttccggtctcctgactctgctgtgactagccccaagggcaggtgtcctggaggttttatttggcaactgggactcctgacctgggatgacccttgggaatgattcagggaactggaggccaggggaaatgaagcccaggtgtggctgaattgtccagtggaattcatagtcctccccaggcctcggtcccaggcaaagttagtaaggagttatttgtaattttcttttctgaagctaggtaaaagagaaatggggagaggcagatcctagctcctgatttgtttgtttgtttattttgaggtagggtctcctatatcctaggttggtctccaatttacttggtaaccaaagatgaccttgaacttctgaccctcttgtttccacttctttggggctgggatggctttgtgtggggctgggaattgaactcaggttgttagggctttcactgcaagcaccttgccttgctgagccatcttaccagccccagtctgtcttttgattgcttttttaaaagattcatttattgtgtgtttgcttgtttgcttgctttcgtgcattgcctttgcctttggaaggaagccagaagcccctgaaacctgagttttagacagctgtgagctgccacatgggtgcttggaatggaacccaggttccctggaagagcaggcaatgctctttaactactnnnnnnnnnnnnnnnnnnnnnnnnnnnnnccatccctcccgcccccccccagccccccaccccccctttttttttccttttctgttttgagacagagtctcactgtgtttctcctgctatcctggaagcttctatagcccagctggcttcagactcccagagatcttcccacctctgtctcctgtgagttaaagggatgtacctggccccagtgtacattctaaggtgttttcgtcaatattgagtctctcattgctctgtcttggaagctgctgggctaactgctcgggcttgttggcaaagtgtccatctctgcgtgtgttaattcctgcagctttaggctgggcattcaggaggcactttaacagcctctaatcacatttaaatcactttctccaggatcacgtggaaggcctgggagcagtgactggaactgattgagagaactgaggaagactgttgccctccttccaacctggaggatgaatctgaggaagctctgatcccgagggtcgtgccaacagtccctgggagtctctggatgtcatgtgtgatggggacctttcctccctcagaaactacatgctggccaaggaaaccaggttgcccccagggcgctgtgtggctgggttctaatagcccggtgtgtaaattgatcaatgtcgaaaatcctctttgacctagtcagtgattgcttccagaggcagaacgcaagagctgccctagctggatgcctctctgatgctctgagtatttctcagtggcacagagctctgggcaggaccctgaataggcggtgggccctcctctgcaacatgtgaaggcttatcttatccatgggaaacacatgcaaggatcctcaagtgtaaatgaaaatacctgaaaagaagctgtgtctggctgtcaacacaaggctcctggaaagaatatcatccttttttcttttaataaaaaaattgtatttacttagaaacattcagaatgtcaacaaaacagctgcaatttttttttgcaattacagagtggtattcagttaatagaacaatgatctttgtataagttgcatcagagacaactgaagatgaaaaaaaaaaaaccaaaaaacaaaaagctgctgtccccaaatatgactaaccaacaagaacctgctttaaattttcatgccaatttacaacccccagactgtgccaggcaaggttggtggctactgaaaataccaccaggacagggctacctaaagacatattcagtagtgtgttaactatacaaaaaaagacactgtacagtttaaaaacaaatcttacacagccttatatttcaatttttttctttaaaaaggagtgagttgtgtacaggggggttaaatgctctatagacaaaaaaagtttcgctaaaaccaacttttcgtacttcttcagcttggcagccatcttttcacagggctgcttgtcctctgcagcagtgtcgttcagcgttctcccagtttctttgcgacatcaccaatggacaagccagggcattcgcctttgattttttgggcggcactcagagcagaacaagaaggctgacggaggcctcttgggtgcattggggtccttgaacttcttttggtctcccctttggggggggatgtaggttttcttttggggggtggggttttaagtcggggtttctctgtggctttggaggctgtcctggaactcgatctgtagaccaagctggtctcgaactcacagagatccgcctgcctctgcctcccgagtgctgggactaaaggcgtgcggcaacaccactcagctgggacgtaggttttcatttctgtttcataatgggccttgtcagcctttgccatgtcttcaaacttccccttttctttagcagacatggttttccacctttctgagcacttcttcgagaactctgagaagttgacagaagcatccgggtgctgcttcttgtgttcctcctggcaggtttgcacaaagaacgcatgtgaggatttttgcctctcagcttcttaggatctcctttgcccatgtttagttgatttttgtggcaggcacagagtcgcccatcgcccgtcctgctcgcccttgcccaggcgctgtctctatggagctcaatgtaccacaatggctgtgagagcaggagccagactggaaggaattgctgtgtctgcagagactggtggaccaattggaatttcagtactgtagagaggtcgaattttgtaggttcagaatctaattactttatttgggctagttttagcctcctggaacagccataccttgtccactctttaacacctggcgataacaaataaaaacttcttagaagctattgacacagctgatcatcggcttcagcaatccaagagcgctccctgtctccatgtatctgcctctttggtgaacccatcaacatattttaaacttgtcttgatttatgactttctttgtgaatgaaaaaaaaaggggggaaagaaattaaaaagacacgactctacttaggtaaggtggaggagaaagtgtgttgcagataaaagggagagcatagccagaggcacatatctgggggaactcagagtggacatgaccctgacccaagccttgtgaggagagggaaggagccaggagagaaaagggtggacaagaaggccaggtaaccaaatggctgggttagagaagagcctctgggggaagggtggcccagcccctgggatggagatttctgggtagagggtgagggtgtgctagccataccctgtaacaggtagggactgagggatgctgggagaacctggcagccaggtctgctttgatatgtttaaataagcctcagtcatttgtcccaggtttgagacctagcactgttctgtaaaactataaaaaacgccataacatggaatttggggtgacaaaaatatgtgtttctgggcaatgaccacgaataatggctccagaataaactctcttttcttgtcgatgcaagagatgcctgaaacccagacagtaacagttcagtctgtatgatggtgcatgtttgcctgtctcaggcatgtctacctatgataactaattgtgtgtgtgtgtgtgttgagtataggtgtttgggggaggccagaggtgttgggtcacttaaaactggagttacagggttatgggctgctcattgtgggtgctgggaaccaaactcgggtcctctgcgagagcagcatgtgcttctaactgctgaacaatctctccagcccccaagttttttgtttgttaaagaaaggctttcatgttgccctggctggccttgaactcctcatccttctgtctcaatctctcaagttttggggttacaggaatgtgtcatcatgcctatcttaattgatgagttagctaccgcaagagattaacaacagctgatgacagaacagttagaacgctgtgcagtatagggagacttcagaactatggattgtttgtttctggaattttccacttagtactttctatcccgggctgacccagagtatttgaaaacgcggagatatggggcagctaatgtccagagggcgagcaaggcctggctcccttggcagggcacggcctcttggtgtgggcagtcttctcaaagttactttagacaacccgcatggccaggctgtctcctgcgcccgcctgttcagtttgttccagaggccggttcttcctggaactgggtgtcagttcaggacagagaatgctgggagtgaaacttggccccaaagggaagaaaagctttccaattgtgcatgagatcgcagattgctgagctgcgttgggcggggcttgcagttcctgcggaatgccaccaggagacgcgctttccacgcctcacaccgagaggtcacgctcgctcctacgtgtgtatgttgcaaatggcttttctaggattacagtataaagtcgtgattcagcttttccaaatgatgtattcaactcgagttacaagcggctctagttatgtaacgtgaccacccttgacaatgggctgggggaaaggagtggtaactagctctcactcttcaaacgaccttgggtcttcgcatttgctgtcagggtcacaggaggcccagcagagggagaagaggtgtgtggaagctgaatcataagctccagcttctggatgaactctgccactctccagaaggtaccatcagtggcattaattaagagctccagggccagcagggaactggggacacacgactttaatccaagcatttggattaaaggaggcagaggcaggcgcgatcctttgagatcgaggccaccctggtgtacagactgagttccaggacaggctccaaagctacacaaagaaaccctgtctggaaaccaaagcaaagcaaaaggttcagggccattggcaaattctccttgctcctgtcagttgttatagactagtgttgtttgactttcttttggggccttcaactcacacataaggacacggagacttcttattaattatgaaaacttggcattgtccccaactagctcttataagttaaattcatctgcttatattaatttacgttctgccacatgtatttttttttatctctcctccattctgtaagtccgacttggtccgcatctggctggcatctctttgtgcttagattcatctcctttttctctctattctctcctgcttagctattgacaattcaactctttattaaaccagtcagaagttgagttgactagctgggcggtcccagcactcgggaggcagaggcaggcggatctctgagttcgagaccagcctagtctataagagctagttccaggacagcctccaaggctacagagaaaccctatcttgagacacacacacccccaaaaaaccaagtgagacacatcttcacagtgtactggaagattatcccacagcacccaagggtggagctgccggcagtgtggctcagagtctgtccgctgacctgctgcctagcacaggcaagcagaggacatatgggtcagacagtgaagtgagggctgcagagaggccatgtaaggtgaaccggacccgtgggactggctagtttttatttaatggcatagagagcattatgtaacgctatatacactctgcctctgtataaagcacggttcaccccagccagggtcaaaacaagcaaggaaagcattagaaaccttccagcaagtctggaaagatttcagggttatggggctgagaaatcccccggataaggctgagagaatgttatgttttttctagaaaagtgccatccatgttcaatacagtgctgccagctcgtatgaggtggggtggggctctaagttgggagagaagacaggagatgatgtcctggatcctttgtggtgtctgtgaggaggacagattgaggtttccttgatgttcctggggggagaggctggctggcaggcagtagatgaatgcttatcttgtggcttttgccaagggtagacagatataggtcacagaaggtatgggtctcctcagcaggctggagccagcaggcacagctcatagttttggggacattcacagtggatgtgcagtaggatgcctgtgacctggagacctggggaccaaaggaccccagcatccctcctgtgtggtgttggcatccatcacctatccacttttctttccttttgttgagatttgtttattttatgtgtatgagtgttgtgcttgtatgtgtaccacatgtgtgcctggtgcccacggaggtgcaaaggtgtcgttgggcactctagaccaggagtaccgatagctggctgtgaaccaccatgtgggtactgagaattaaaccaggtcctcagcaagagcaacaagtgctcctaacctctgagccgtcactccagccctgctactccccttttcctctaaatggcgagagggctggagagatggctctgcgatgaagaccatggctatcttccaggggtcctaagcttggttcctaaacctacattgggtgctcacaactgtttgtgactccagctccagggtatctaactccttctggtttccatggacacctgcacacaggcggcactccttcacacagacacacgtgtaaacataaatttaaaaaagtctcttcaagcagaggcatacaagcaacaggaagtggtctgtttcactgggtgtggcttgagcaaatagagccctcaaaacctacctttacagtgagtggcacacttcctccaataagaccacaccccctaatagtgcctctcccttggggggggcattttctttcaaaccaccacaggcattttcttaattagtgagtgatgggggagggtcctgcccattgtgggtggggccaccccgggcaggtggtcctggcttctataagagaacaggctgagccagccatggagagcaagccagtaagaaacacccttccatgacctctgcctcagctcttgccttcaggtcctggcccatttgagttcctgtcctgacttcttaagacactaacagtgatgtggaagtataagccagaaaaaccctttctttcccaagctactttggttccgatgtttcatggcagcagtagtcaccctgactaagacagtcagtgactgtgtgaggcagaaaaaaacaaaacagaacaataacaaaaaaccttgaaaatttttagagatggggttgcttaacaaggtctcactgtacagtctccaacaactttcgagtcccaggctgttctcaaattctgagtaccgggattacatgtctggctaactctgaggcagcagcaataggagaactgagaaaacttctataaattaaaacctgattaggtggggttggctcttgcctttaatcccaggattcggtgtgtagaggcagggggggttaagtccgacttggtccgcatctggctggcatctctttgtgcttagattcatctcctttttctctctattctctcctgcttagctattgacaattcaactctttattaaaccagtcagaagttgagttgactagctgggcggtcccccctagcctccattacaggcatgttctgccatgaacatacttaggccctgtgtgttttaatatgcatggaggccagaaaagggcatcagatctcctggaactggatttgtggacggttgtgagctgtcacgtgggcgtnnnnnnnnnnnnnnnnnnnnnnnnnnnnnnnnnnnnnnncggaagagcagcctgtgctctcggctgctgggtcatctctccaggccctgtgtttttaagagtatgagagcagccaagagcatcacaagctttcagtgtcaaaggcccgtcagacagtaaaggtgcctagctccagatcaaatgcttttggttgcagctggtgaggaatattttaattttttggttttttttttttctccccaccactttctccctttcacccccacattcagcagaaatcagatcacagcagcttatttgacttcctgtttcagacatgaggcattctggggaaannnnnnnnnnnnnnnnnnngtaggagtctcttctgttcttggcatttcccttgaatgattttttttttttttatacagtctgattatgtagcccaggctgaccttgacatcatcacagtgatcttcctgcctcagtctcctgtgtgacgatagacttttgccaccacacttggctctttcttagggctggcaaagcagtcccaccctgctcggtagctggcctcccctgaggtcttgctggaccttgagctgccctgggctatggaagaggggagagtccaggatcttcctctctggctgtcctcaaagacgctgggctctctgtgtacttcccaccatgtgaccctcacaaggcactgcaggctttagcaaacaaaagcccctgtgaggcttctgagttctggcctcctaggcgaagggagtccaaagtcctttctcttggcttggaagttgtgggctgcagaggagggggtgagggtaaagcaaagtatgcattagcttcactcactcaggctctcaggagtctgttctctggtcagaaaaccgacttcccctggcactgccaccgtcgttgtcctcggccacagctgctgctgctgctgggtctatgggggtgacttcaactctgaactgaaggtacactatggagggtctttagaacattctcttatttattttttcttcattttcctggacaaagcctcatggctatgtagttcaggatgaccctggacttttcatcatcctgcctccgtttcccatgtgacatggttacgggtatggaccaccatgcttgactaggacacaggaaacaaacaaaaacgttttgcagttccagggacagatctctgggcccctgggaaagaagaattctacaggttccattctccgttcccaggcccccccattgttgtaatttctttttctttctttctttctttctttctttctttctttctcctttcttccttnnnnnnnnnnnnnnnnnnnnnnnnnnnnnnncctctattattaagagacacggtttctctgtgtagctctgtctatcctggaacttgctctgtagaccaggctggtctcgaactcatggagctcctcctgcctctgcctcacgagtgctggggttaaaggtgtgtgccaccaccacttggccctctttcttttttgattcagggtctccctaggtttcccaggatgactttgaacctctgggttcaaataatcctcctgcctcagtttcctaagaggctgggaatacaggtatacacatagcactttgccaaaggacagctttaaattgtgttttaattgtatttttagttatatatatttgtggctgactgagtatgggattgtgctctcagagtcaggaaggaggcctcagatctcccggatctgatcacaccgaatacggtgtgagctgctctggggtggggtgggggtgctgggaactgcaccccggtcctgtgcaagagcagcacaggctctggacatcggaggcattgctccagccccacaaaagacttgtttttattgacacctagtagggccagtgtggatcctgagggaaggaaagggtgaagagctaagaaagaaatgtgcagatgagacagaacgggagaaagagaaaaacaagtgaccgcagagggcaagaggaaggtggtgaggaaagactgagggacggtggcctctgcgccctgcctggatgaggctggcttttctagtcccgggggtaggaggaggctcctgtggcccccgtctttccaccttcctctgtccaagcgagaggcagtgttgctctctggcaccttcctcatctctctgacgtgtggagtgtgtggaatgctgtgctcacttctcacaagcagctggagactgagataactccctccctggaatctagagaattcggggtactgtggggagagagggagttggcgtcaaagcctctctgagctgtcagcaggacctggccaggacccatctctgaaagagatgggcagtggggctgggggagggaggatggcagtcttagagaatggtcccaggaatactagtacgcactcatgtttgcagggaccacttccccaaaagacagcaagtgggaaagtggtgccgaagctgcaagctcccaccatgctgtgcacttgggaactgaggcagggcactcagagctccccaagggccttcgtggtgatttctagtccctcacctcttagtcgagcaggcgccaatgtgctccgtatccttcaaagtagtgattctaggacagcattacccagaccaaggaactgtctctgagcggcagtgtctggggtgcccggtggtgtggggcccatctctgtcccctgagcggcagtgtctggggtgcctgatggcgaggagcccacctggatcagcctctgtattcggctcctgtcactcattttgacaagagtctctcacaaacacctccggtttgtgatccgcagctgttgctcaaactgtcgccttgtaacttgagactgaatgctggtcataagaaacacttgtcaatggaggaagaaaaatacgtttgtccgctgttgccgtctgaatcacgcatgtccccagaagctcacgggcttggtgtccagtatagcagacaggagtgaagccctttaggggggtaattggatcatgatttggtacctggcctcaaatttggtatgcctcggaggatgacattgaattccaagtctgctggcctctacctcccaagggctagaataacaggtgtgtgccatcttgtctgactgtggtttggttttttttaaacagcatcttgctatgtaacccatgctggactggaattcactgtccaggccagggagactgggaaatagggaagatttcctgcatcagcctccttaatgtgggacacatgtaccactgtgctctgtcgttgacttattttttctgtccttgacctcacaagtgcttggcaggctctcgaccactgaagtaaatccccagagatatttatttacttcctacagctcctttcacttttttatcttattatacttttatttatgttacacatgggtgtacacatacaccatagtgctcgagggaaagtcagaggacaacttttgggagtttgctctttctttccaccgtatgattcccagagattgaagtcaggtcgtaaggcctggtggcaggctcctttaccccctgagccatctctctgacccagactttccctcttttaaaatcatactttaggggggctggagagatggctcaaaggttaagagcactgactgctcttccagaggtcctgagttcagttcccggcaaccacatgggggctctcaaccatctgtgatgagatctggtatcctctgctggcatacaggcagaggatacataatatacataataaataaataaaatctttaaaaaaaatcatactttaggaagagcctcgagggaaagttctcagagcagagaccagtctctaaacgtctgtccttgagacacagggtgtgtctatgcccttctctcagtgaagaatcctgcctccccagggatcaatgtgcctgggtgctcatggctgaggacatcgtcataggcaaacttgagttcccatgtttagcctcatgctcaatgtcctcagagaccatactgcagtcagacaaacccaaggaaatgcacctcaagcccatacctcagaggagtctcccatgatgaccaagctcagtcaaggacacggacttgacccccacagtctgatgtggttagcacacgtctctcctcaaatcgcccacaggcttgactcacttgaaacagtgctgcagttcttgcagcaggatgtcagcaagcagctgggtggtggcggcacacgcctttgatcccagcctcaggaggcagagacaggaggatctctgagttcaaggccagcctgatctaaacagtgagttccaggacagcccaggctccacagagaaaccgtctccaaaacaacaacaacaaagatattattgtcaagcacagctatcttggtttgctaatcataacagaacttaagaaccatcttccagataagcagcacctcatccaaaaacaccaaatcgatgacaggaagataatcaacttgtctctgatattgcccaattgttcaccaaatctgagcatataaaggacctacaacatggacactggatgcctcagggacacatttttaaaaacccacctccaggacccattttgagtacattggaacagcgtggagttatgaacgataaagtcccatttattctactcccgggtttgaagaggctaagggggcggggctgacctgtgagctctgtgtgccaatcaggtaaaggagacaattttcccaatgtgatctttttttttttttcttttttaaagatttttatttatttattatgtatacagtcttctgcctgcacgccagcagagggcacctgatcgcattcagggtggttgtgagccaccatgtggttgccggaaattgaactcaggacctctggagaacagtcagtgcttttaaccgttgagccatctctccaccccctaatgtgatcttaatccaaggctttttcagcagttacttatgaaccctgtgatgggtaactgtagcatcctttcttgttgggctatctttggaccgccatcccacaaataatgacctggagatttattattaaatatgaaagcatggcctttagcttatgcttgtctcaactagctcttataatgtaaattaacccatattttttaatctgtgtcctgccacgtagcattacctctcttcagtcttatacctcttgtttcttttctgtgtctggctgacaactctgtcttttttcttccctctcttcctgcctggcttttggccatccagctctttattaaaccaatcagaaactgccttggcaaagatacaaaatctttacagtgtaaacaaatattttgcaacagggaaccacacagctttcccggagtcggtgagtgtcatgacagatgggcagcagttccagtcatcttcaaggtgcgttggatgaatccaatcaaatgctggcagaagggttctttagcccagactctgtcctgtccataactaggtgtatttctaaaacagttctgttccagtcaatgatattaaattcaagagagaaatacctgaaacctgtcatgtaagtctagagactgagcccaaaggggacaccacactggagaaaaagagtgagtctgtattttattttttgttttttgagacagggtttctctgtgtaacagctctggatgtactggaactagttctgtagaccaagctggtctcaaactcacagagatcaacctgcctctacctccagagtgctgggattaaaggtgtgcaccctgccccccccccccccatgcaggcaaaacaccaatgcggcccccggcaagattgggtctttatttatgtaaccacaaagggtttgatagggttaaaaatctaagagaaagttggtcacgaatcagctctttttatcagctgtgttaggtgaatcatcacccgaagtattaagtaaagtagtcattttatcctttaattggtatggcaaacattaagagggataaaggcatgagagggaggattgctgcaccaggggttggaaaagttatgccaggcaaagaactcccatcaagatcagaagtgaagtgaattaatccaagtgacggatgagaaaatctgatcaccagacatcacgaggtctggcaagacggcttctcctgggagcggagcgtgcagaaagatgcagatgatggaaaaactcccaaaggatacagggttacagaatatgagcccagagttataaacctgatgtcgaagtcggcctccccatgtgactaccattccagatgatactaagtgtattcaattgtggactggaaatccattgtcatgccgaccagtcttccacttctcacccaagagatttcttaagaagtaacaacacagcttacatgttctatagcacgatgaaagggtgatttggtatagctttactaatgttactaataggttttctgctgccccacaataataagtttttccgacaatgcagtaagccagatcaagccggactgaaaaagtatagccacaggtatgttgagcaaagcaactctcaggccggctcacagatctcggagaacgaggccagagaagctgtgctcccaagccagggcaggaaggttttataggttgtggatgaggggtgatgatgtgtcagccttaagctggctttgtgcccaagtaaggtcaaaggcttaggtggggacgagggtggctggtagcacagggagcaagctgcagtatcggccaagaacgtggaactgggtttttggtgccgttcctttgttaggaggttctctgagtggcagggtttggagagagaggagtggaagatggggcttcctggatcatgcagggtgagctggaggctccaattgaactgttgtggtgatcacttgtttgtacaaataaagcatgtctgaagatcagagggtggagcttgccaccagctaacagacagacaggaagtgagatggctgggcggagagaagaatataggcaggaggaaacaggaacacaggaactaggtcttttttttttttttttttatctgggaagtcagcaaagtgtggctgttgcttgcttcttcatctctctgatctttcagcttttgcccctgtttctgattccgggcctctattattaagacctattagaaactatttgcattacaaactattatttctttgtatagctccgactgtcctggaactcactctgtagaccaggctggcctctaacacagagattcgcctgcctctgcctcctgagtgatggatcaaaggcgtgtgccatcaccgcccaggttgatataattttaaatagaggaaaacagggagtatgttcagtttaccctctcctccttgaaaatgagtataatctaaagcttagaaatgagaccaatcagggcaatattgggtgctaagtgctttgttggagcctttggcttgcccctgcatggtcctggtccaagtccccacctaagtgctcagcttttgaccatacttgggcacaaacccagcttgtggcaggccatcaccctttgtctacactctataaaactttcctgctctggcctgggttctctgggactggagaacccaccgaggagttgctttgctcaatatactcattgttacacttttccaatacagtttgatatggcttactgcatcggtggcgacacctactatcagcaggcagaaaacttactaataagaaaggacagaatgtgtttggtttggctgtggtggcacattcccagcacttgggaggcagaggcaggcagagctctgtgaattcaaggccagcctgggctatagagtttattctatgacagctaagactacacaaggaacaaaaaacaaaaacaaaaacaaaaaaaaaacaaaccaaaacaaaaaaggacagaatgtaggccaaagaacacatgagtcatgagacagggtataaagttatttttctccccctagtttcaactctgtcatagttttctcttgtggatgtgtgaaatcagcttcctgggtattgaagtggccagttgctctgaccgaccttggcgttgccgtcttgcctgcctcacccaccccagtggcttgcaggcaggtctagtaccaacatgttcaactgtgctggctcattgatgaattaattctctgcttcccagctactgtggagcaggcagtgctactcagtcctgtgctcccatcaaggcattctccatcaccctggtcctgtagcatcaggaccaaagagtcagtgtctaagactcagaaaccacaaagccgaataaaccttccttttaagtgttttatcccaggcattttatcacagcaatacaaagctgactgatatacagccttaaagactttgttgtcacatgcctgtcgtgtaatccctgagctagagaagctgaggcaggtggagactcatgagttccaggccatcctgggctgcagaggaaggttgtacctcaaacaagtttggttgttaaagatacggcatctctaagtggcccagactggctccacgtctccatcttcctgcctccactcctggagtctgggatgcagacatctgatatatatacgcagctgcttaaaaccttgcagcatgacttcatacaaggtggatggctggtttcacctagcaacctgctaaccattaaccacccgtctgtgaccttgctgatctagattagctcattgtatagcatggtgcttggataccgtggaaagctgtttacttacaatgatggacatttagccaggtgtggtggtgtacacttgatatcccagctctcaggaggtggagacttgaggaccaggtgtgcaaggtcattggaggacagtctttacattgtagggatggttaagagcacttgctgctctgcagagaccaccatgtgttgtatacagtgtcgggtgaggccagaagagtgtgttcgatcccctggagctagagttacaggcggttgtgaaccatcccatgtggatgctgggagccaaactccagtcctttgtaagagcaacaaatacccttaaccactgagccaactctccggccccttattatatttttttaccctctggattgagactccagaaatatttttgatttattgtctgtttgtgttggatcctttgagatgggggttctcactatggagtcctgactggtctggtggtcctcctatccatactgtctgtgtgcctagattacaggtgtgcatcaccacatccggggagactctagacgtcttgaaagttctttcagaaacacccagaatttgggggcaggaaagagcgcttgcctaggagactaagacgctgagttccatctctagcaggctgagactgcaggttctgttgatgatggaggtttctgtcctgcctggtcccacagccaattgccccaaataaacacacaaacactatataagcataaaactgttagccaatggcctagggcttcttattggatagctctgtcttaatcattaacccataactactaatctctgtatttccacatggccttatcttaccagagaacacctggcacattctatcttcctggtctttacatggcgtctcttcctcgaggcctctctctcctctccctacccccagcattctcctcatctggtagccccatctctcttcctgcctggctactggccaatcagtgttttattcatcaaccactgagagaaacatacatccagaaggacctcccccatcgttctatcactagcgtaaattaggtaagaaggaaacttctgaagtccagtatgttcccaggaaacttcctaaaatcagcctttcagaagaaaggcattttcttttctctgctctttgcacattatcgacggaacccaccaagttccaggcagacgtggctattgatactagaggatcaacgctgacatagttggtttctagtagacacccatggcttactcgagcctttaaaaagtttatggtacagtggtttggaaatgacaaattatcaatgtccaacacagggtcccacaatgaagccattggacaacttcctagtctgcttagaaaactgacagtcacttcaaacatacaataacccagggagagatgaaagagccttctgtcactgctcaaacctgatcagattcactcagtctgcccctccaccttctggctggagattttgttatgttttgagatcagctagcctcagagtgatggaaatcctcctgcctcagcatcccaagtcctgagatcacaggcattgtactctctgcctggcttgttggagatcttttcaaatgaattccagaaaccacagaatttcacctttagttcttactgactgcttgtaggctgaaagctcagtgccaatgcacagttcattgcaagacattcgataaaggtttaaaactgatgtactggcccggtgggtaaatgagatactcattacaagtaaaggcacttgtgccaagcctgaaaacctggattccatccacgggacccaacatcgatagagaacagactccagaaagttgtcctctgacctccacaagtaaagccatgcatacaagtgcaccccatacaaataaatataactttaaaaatgaagcaatatagtataagcaaaaacacgctggtatattctaaccaggttagcagttcatacttgtaattctcagtacttaggaagcagaggcaggaggattaccacatgttagaggttaatctaggctatgtagcgacgaattctaggtaggtgtgggctaaagagttaagagtctgtcagtcaatcacttaacactaatccaaaatacagcaatatacaaaaatacgccactgctgccagtgtctgagataatgtggtgatgtcttgcttgaacaaataaagtctgtctggggggtcagagaatggagttggccactagctaaccatagaggtctggaggtctatacagacagacaggaagtgaggtagctgaagggactgcatattcttgagggattcctccagccctttataacccccagctgaggtttggtaagaataaatgggggaaaataagagggttggtgttcaaagtcatagagcctggcaaaaataagagtataatgtattgtttcacatgaagagagatccattaaccacaaagtactctaggcatccttgtagaaaaattacacagcctatggggctggagagacagctcagcagttaagagcactggctgctcttccaaaggacctggattcaattcccagcacccacatggcagctcacaactgtctgtaactccaagatttgacaccctcacacagacatacatgcaggcaaaacaccaatgcacacaaaataaaaataaacgaattattaaaaagaaaaagagaacttacacagcctaacaaaacaaaaccctgggactcccacaggcaggaaggagctccctggcctggttcctgagctgaacagtgtctcctcaaactgacagccaaagtgagcaaagccaggcccagaaagatgagtgactgtataagttcatctgcagaacactctagaaaatgcaagctagtctgtagaggcaggaagcctgtcagtgtttgctctggaatagagggagggaagaaaggagggtaacagatgtacacactgtctggggacgaggtgtcgaggctccacaggtgatggcccttatcaaagggctcagattatctttgtttttccctccttttttgggtttctttgagaccggtattaaatagtctggcttggccttgaacttgctatgcacccaggaatcgccttggttatagacatgtaccaccgtgcctggctaaagtgcatgctttgcatttctgcaatttattatatgattattatcttctaataaagtttatgtgaattttttggggggaaccaagggtgggagcacatatgtaaccccagcaccggggaagtgtaacatgaataatataaacccagagacagatactggggttcaagctgaagatcggagaagcaaagcagccagtcactagctcttaaacctctacctcagacttggggcaggggtgctgatcctggctccatgaatgctcagcatggctggagactaattgccagctctgagatcctgctgctatcttatagacctctctagtgctgggattaaaggtgtgagctctgtttctcttttatacttatttactctcctgtagccctgggtggtcttgaacccacagagatccatgtgcctctgtctcctgagttctgggataaaaggtgtgccaccgctgcctggcctctatgactgtggctagctttgtgctctgatcttcaggcaggctttattagatagaccataaacaatatatcgccacaggggaggcagatacaggaggattgcagggatatagagcaacaccctgtctcaaaaagaatggcctaggagctggaaagagctgtgtcatagaggtgtggtcctgcagctctaagcccagctcgtaagaataaagtattttcagctagaaggtgacaaccacatgtcagaggttaaggaattttaactaaatgtctgggcctggcattcagtgacacttttgtttagttgtttgttttgagacagggtctcactgtgtagccctggctgtcctggagctcaccgtgtagtccaggctggcctcaaactcacagatatgcccctgcctcctgaagaagcttcatttaggcataaggcttctctcttctttttgcatcatttacagaacagccatctttagtggggacaggggtatgcggggtttgtgacagaagacgtaacccttctctttttctcctctttgcccctctgtcctcctcttccttccttgttgagactggatctcaagagctcacgtcctcacactcactctgcctcccactcctaatccacctgctttagggatgtcaaagggtcttgcggcttccacactcctctgcctgggatggaggcaggcctgtgttccacgtggtgacgagccacgtgcacttatattccacaaacgtttcctggagtcctcttccagatccccacaaggggcacaggataaacacaatatgtctctgcatacatgcagtttgggaccaaaacagcacacgtataaacagcaacaaaaagcacttaagctttaaggtcagcggctttggcacaggccaagtccaccaggcttcgctgctgcttctgcttgggtgagtttgtacaaggcctgtgagctctcaagcagatgggccctgacagccagtccaccacaggagcttcgcagacaccccacccccaggctgccagagccgctctcctccctcgggagattaactctcagtgtgcagaaagtgacaatgacctccgaagatacccactttatgtctagggtggttccttcctgaccccaaagagcgcggaggaggaagcaggagaatcaggagtttaagacggcgcccttaaatgcatatcaagttcggggctggagagatggctcagaggttaagaacactggctgctcttccagaggtcctgagttcaattctcagcaaccacatggtgactcacaaccatctgtaatgagatctggtgccctcttctggcctgcagggacacatgcagacagaaaactaaactgtacatactaaatagtttggtaagaataaatgggggaaaataagagggttggtgttcaaagtcatagagcctggcaaaaataagagacctgaaacatcccaaccacacaagacttaaaaaaataaaagccaggtggctgggtagctcatcacggtcattccaacatccaggaggctcatgtaggaggacagtcacaagttccaggccagcctcggacacagagtaagacccgatctcaaaaaaccaaagtcaaggaaataattatatactcaaaacaaacaaacaaacaaacaccatgtatgtgcttcctggcacccctgcccctaattcactcccctacacatcctcatctaactgtgcacaagctccgtggtccagccaggcagacaagtgttagaggaagggcttccccaaccttagaaagctgctcaggaaaatgctcttagagccagtcagcctcctccagccctcactgcagggacagtcagcctcctccagtcctcactgcagagacagtcagcccccacagccctcactgcagagacagtcagcttcccccagccctcactgcagagagagtcagccccccccagccctcactgcagggacagtcagcctcccccagccctcactgcagagacagtcagcctcctccagcccnnnnnnnnnnnnnnnnnnnnnnnnnnnnnnnnnnnnnnnnnnnnnnnnnnnnnnnnnnnnnnnnnnnnnnnnnnnnnnnnnnnnnnnnnnnnnnnnnnnnnnnnnnnnnnnnnnnnnnnnnnnnnnnnnnnnnnnnnnnnnnnnnnnnnnnnnnnnnnnnnnnnnnnnnnnnnnnnnnnnnnnnnnnnnnnnnnnnnnnnnnnnnnnnnnnnnnnnnnnnnnnnnnnnnnnnnnnnnnnnnnnnnnnnnnnnnnnnnnnnnnnnnnnnnnnnnnnnnnnnnnnnnnnnnnnnnnnnnnnnnnnnnnnnnnnnnnnnnnnnnnnnnnnnnnnnnnnnnnnnnnnnnnnnnnnnnnnnnnnnnnnnnnnnnnnnnnnnnnnnnnnnnnnnnnnnnnnnnnnnnnnnnnnnnnnnnnnnnnnnnnnnnnnnnnnnnnnnnnnnnnnnnnnnnnnnnnnnnnnnnnnnnnnnnnnnnnnnnnnnnnnnnnnnnnnnnnnnnnnnnnnnnnnnnnnnnnnnnnnnnnnnnnnnnnnnnnnnnnnnnnnnnnnnnnnnnnnnnnnnnnnnnnnnnnnnnnnnnnnnnnnnnnnnnnnnnnnnnnnnnnnnnnnnnnnnnnnnnnnnnnnnnnnnnnnnnnnnnnnnnnnnnnnnnnnnnnnnnnnnnnnnnnnnnnnnnnnnnnnnnnnnnnnnnnnnnnnnnnnnnnnnnnnnnnnnnnnnnnnnnnnnnnnnnnnnnnnnnnnnnnnnnnnnnnnnnnnnnnnnnnnnnnnnnnnnnnnnnnnnnnnnnnnnnnnnnnnnnnnnnnnnnnnnnnnnnnnnnnnnnnnnnnnnnnnnnnnnnnnnnnnnnnnnnnnnnnnnnnnnnnnnnnnnnnnnnnnnnnnnnnnnnnnnnnnnnnnnnnnnnnnnnnnnnnnnnnnnnnnnnnnnnnnnnnnnnnnnnnnnnnnnnnnnnnnnnnnnnnnnnnnnnnnnnnnnnnnnnnnnnnnnnnnnnnnnnnnnnnnnnnnnnnnnnnnnnnnnnnnnnnnnnnnnnnnnnnnnnnnnnnnnnnnnnnnnnnnnnnnnnnnnnnnnnnnnnnnnnnnnnnnnnnnnnnnnnnnnnnnnnnnnnnnnnnnnnnnnnnnnnnnnnnnnnnnnnnnnnnnnnnnnnnnnnnnnnnnnnnnnnnnnnnnnnnnnnnnnnnnnnnnnnnnnnnnnnnnnnnnnnnnnnnnnnnnnnnnnnnnnnnnnnnnnnnnnnnnnnnnnnnnnnnnnnnnnnnnnnnnnnnnnnnnnnnnnnnnnnnnnnnnnnnnnnnnnnnnnnnnnnnnnnnnnnnnnnnnnnnnnnnnnnnnnnnnnnnnnnnnnnnnnnnnnnnnnnnnnnnnnnnnnnnnnnnnnnnnnnnnnnnnnnnnnnnnnnnnnnnnnnnnnnnnnnnnnnnnnnnnnnnnnnnnnnnnnnnnnnnnnnnnnnnnnnnnnnnnnnnnnnnnnnnnnnnnnnnnnnnnnnnnnnnnnnnnnnnnnnnnnnnnnnnnnnnnnnnnnnnnnnnnnnnnnnnnnnnnnnnnnnnnnnnnnnnnnnnnnnnnnnnnnnnnnnnnnnnnnnnnnnnnnnnnnnnnnnnnnnnnnnnnnnnnnnnnnnnnnnnnnnnnnnnnnnnnnnnnnnnnnnnnnnnnnnnnnnnnnnnnnnnnnnnnnnnnnnnnnnnnnnnnnnnnnnnnnnnnnnnnnnnnnnnnnnnnnnnnnnnnnnnnnnnnnnnnnnnnnnnnnnnnnnnnnnnnnnnnnnnnnnnnnnnnnnnnnnnnnnnnnnnnnnnnnnnnnnnnnnnnnnnnnnnnnnnnnnnnnnnnnnnnnnnnnnnnnnnnnnnnnnnnnnnnnnnnnnnnnnnnnnnnnnnnnnnnnnnnnnnnnnnnnnnnnnnnnnnnnnnnnnnnnnnnnnnnnnnnnnnnnnnnnnnnnnnnnnnnnnnnnnnnnnnnnnnnnnnnnnnnnnnnnnnnnnnnnnnnnnnnnnnnnnnnnnnnnnnnnnnnnnnnnnnnnnnnnnnnnnnnnnnnnnnnnnnnnnnnnnnnnnnnnnnnnnnnnnnnnnnnnnnnnnnnnnnnnnnnnnnnnnnnnnnnnnnnnnnnnnnnnnnnnnnnnnnnnnnnnnnnnnnnnnnnnnnnnnnnnnnnnnnnnnnnnnnnnnnnnnnnnnnnnnnnnnnnnnnnnnnnnnnnnnnnnnnnnnnnnnnnnnnnnnnnnnnnnnnnnnnnnnnnnnnnnnnnnnnnnnnnnnnnnnnnnnnnnnnnnnnnnnnnnnnnnnnnnnnnnnnnnnnnnnnnnnnnnnnnnnnnnnnnnnnnnnnnnnnnnnnnnnnnnnnnnnnnnnnnnnnnnnnnnnnnnnnnnnnnnnnnnnnnnnnnnnnnnnnnnnnnnnnnnnnnnnnnnnnnnnnnnnnnnnnnnnnnnnnnnnnnnnnnnnnnnnnnnnnnnnnnnnnnnnnnnnnnnnnnnnnnnnnnnnnnnnnnnnnnnnnnnnnnnnnnnnnnnnnnnnnnnnnnnnnnnnnnnnnnnnnnnnnnnnnnnnnnnnnnnnnnnnnnnnnnnnnnnnnnnncccagccctcactgcagagacagtcagccgccccagccctcactgcagagacagtcagccgccccagccctcactgcagagacagtcagccgccccagccctcactgcagagacagtcagccgccccagccctcactgcagagacaatagcctcccccagccctcactgcagagacagtcagcccccccagccctcactgcagggacagtcagcctcctccagccctcactgcagagacagatagcctcccccagccctcactgcagagacagtcagcccccccagccctcactgcagggacagtcagcctccccagccctcactgcagagacagtcagcctcctccagtcctcactgcagagacagtcagcctcctccagccctcactgcagagacagtcagcctcctccagccctcactgcagagacagtcagcctcctccagccctcactgcagagacagtcagcctcctccagccctcactgcagagacagtcagcctcctccagccctcactgcagagacagtcagcctcctccagccctcactgcagagannnnnnnnnnnnnnnnnnnnnnnnnnnnnnnnnnnnnnnnnnnnnnnnnnnnnnnnnnnnnnnnnnnnnnnnnnnnnnnnnnnnnnnnnnnnnnnnnnnnnnnnnnnnnnnnnnnnnnnnnnnnnnnnnnnnnnnnnnnnnnnnnnnnnnnnnnnnnnnnnnnnnnnnnnnnnnnnnnnnnnnnnnnnnnnnnnnnnnnnnnnnnnnnnnnnnnnnnnnnnnnnnnnnnnnnnnnnnnnnnnnnnnnnnnnnnnnnnnnnnnnnnnnnnnnnnnnnnnnnnnnnnnnnnnnnccagccctcactgcagggacagtcagcctcctccagtcctcactgcagagacagtcagtcccccccaatcctcactgcagagacagtcagcctgccccagccctcactgcagagacagtcagcctcctccagccctcactgcagggacaagtcagctgtccccagtccttacagtagagacatgaggagtctgcagggaacttttgggagagatgttctgcctctggaaattgctgtggggatttgacgtttgcagataagacattcagtcaatgtctggaagtgaagtcttcataagtggagcagggagaaaaacccactgtgacctgatgacatccaaaccaagtcagaaccttccagcagttttggttaagttgtcctcttgtacttgctgccaccgctttgttgttgctttctctgtgtagccctggctgccctggaacttgctctggctgccctggaactagcaaactagtctggaactcaagacatgtgcctggctctgcctcccagctgctgggaggcagaggcaggcagacctccctgaattccagcacagccaggtctgtgtagagagactgtctcaaaaagtgagaggtgtgtggggggtgtctcactgtgtagacccatctgcctggttgtcctggaactccacctggttcttccttcccgtggttaaaggggaacactaccatgcctggcctagacagcacagttgtatacagtgttggacttgaacccaggacagtatgcatgccaggcaagtactctgccaactgagatacatcccaggtcctctcactttaattcttgagtctatcctttaaatttgccttggtgtttcccccatctccactccaccccaggttccaactctctttcttttttcttttttctgctttttttttttttttttttttttttttgttgattttttgagacaggatttatcagtattgtttaggagctttgaagcctgtcctggaactcactctgtagaccaggctatcctcaaactcacagagatccacctgcctctgcctctgcctcccaagcgctgggattaaaggcgtgcaccaccaactggcctccaactttcttgaggagtatgtgtgtgtgtgtgtgtgtatgggaggcactctggactttgaccttcacgaggaattccagcaccacagttttcccctggagtctcctggggccaggttcatgttagtcctgcagtgaggagactctggggacgcatgcatggctgcatgaacagatacttttggaagaacagtcagttttatgagcttggctgaagctatttttaccatgcgtgcaaaatcagctagctatgaattctgaatactttagcaattaaacaatgataaaaagcccccaaacagagtagccgctaacataaacaaagggcaagttgaaaattaacaccaatttaaggtgacgaattgtgttgtttttctgaaataatgggaaccccgcccagcactaggttcttttgaatttggcatgatgttttaccgtgtgcccagtgatgactcagttcttccctggtgcagatctatctaattgccaagaaatatgttagtactggccttgtggctttcacttggtatgaaaccaaccaaggcattgagcccatgaaggagaaccaccagcataagccaggtgctcacatgcaggcagagtcatccatgtgtgagccacacatgtgttccataattgtccaccagaaaatggaaaacatggagtgaaaaatttttctcatagacccagggaagtcattgacttgggttgggaaacattgaccttggcttccagtgtggccttaagctaatcatttactgcttaacaaaatatttaaaattttttatttactgccattaattatcattattattagtaatagcattttggttttttgagacagggtctcattatgtagccttggctagcttggagcttattggtagaccacattggcctaaaactcatagagatcctttggctctgccctctgagtgctgggattaaaaggtgtgtgccctgtaccaccactcccagctgagtttactcttattttagagtatgagtgtttgatttgtatgtaactgcatcgtgtgtgtgtagtgcctgtggaggccagagtatcagattctctggaactggagttacagatggtggtgagcctcacgtggatgctgaaacggaacccaaggtcctctgcaagagcagccagtgcccttaaccactgagacatccccccagcccctcattttcagaactcggtccattctctgtacacaaactagaaagacagagttgctagtattcttcctgagagatgaaggaaagagttaaggtcagcttctttccttcctccctctgtccctccctccctcccttccttcctggacagggtttctctgtgtagccctggctatcctggaacttgctctgtagaccaggctggtcttgaacccagagatccccctgcctctgcctccccgagtgctgggatcgaagatgtgcaccaccacacgaagcatagtgttctttctaaaaatcttatttttgtttatatttatgtgtctgtgtagtgtgagtgcccctggaggccagaagacagtgtcgggtctccagggattggagttacggtgtttatgagtcacctaacatgggtgctgagaaacaaactctagtcctttgtgctcctaactgctgagctttctctccagtccagcctccagcctttgagacgggatctcacgtacccaggatggcctcaaattcattgtgaagctaggaagatagctcagtgattaagcgtgtgtccccagatatgaccaccagtgttcagatatccagcacccacataaataccaggtggtggcctgcctgtgagattccagcctggaaaggcagatagtggatccacagggcaacctgacccctggaactcactgggtagctagcttatgaagactttgaacttttgatcctgcctcccaaacagttgggatcacaatgcctgtacccccagtctgtctctgcttgcctgtctgttctctttaagtgacaaggtcacaggcctgcaccaccatgcctggcaagagtgagcatattttaaagttctccatcacagcagggcacggcggtacactggagaggcagaagcaggcagatacctttgaattctaggccagcctggtctacatagcgagtcccaggacagcccgggctacatagtaagaccctgtctcaaaacaaaaattccccatcatagaactgttgcatggatcaaactcagaaaatctggaaagagcccgcctggcccatcacaggcaggctgctgatcctgagggccccttagcaaatgacagcaggagagaaagtgacgtttttggtttggagcacaaatgtaaacagcctggcgccccggcgctgacattcagcctttctgacccatccctcggtatttgtggcttggggctcctccacatcctcccccactctgccaacttctccatccctgaggcctttctcttctcggcccgagttcccactaggtcacctgcgaggcagcgccccccagtggttttcttgttcgttgccatcactgggaaatccatggaagagagatgaagtctgtatccataatggaggtttaccaagtgcccagaaccaagaggctcaagagtgtgtccagggaaccacgctggatccccactcccatttggaaaagtggtatggaagaagctgggaagtgtcaacttgccttggatctagggcaagttccaacacctctggccctgattgtttttgtttgtttatttgtttgttttttgtttttcgagacagggtttctctgtggctttggaggctgtcctggaactcaccctgtagactaggctggtctacacagtgcaccaccactgccctgtggttggttggtttttatgaagagccctgcccaccctccttcgagggctgggggaaacaatgcagagatggctggagaaggcacctaccacgtgtattgcccccatttacccattacactcctggctagggaagaaggtgagccaccagggctgtgtgggcgggacaaagctggggttgactactttcttccctccaccattgaacttctcatcgctgggaaactgccaggctccagtaagagaggggggaaaatacaaacctaaccctgtaacttcccagctcaaagccccgaggcccttcttccttgccttcagagcagggccaagctagcaatgagacagttcaagctgtggtgctggtgttctccctggcaccatacttccagttaaagctgcctttcacaccctctgctgcctcagccaggaggagccttgcctcatctgcaaatctgttggtctttctttctttctttctttctttctttctttctttctttctttctttctttctttctttcaatacagggtgtctcagtagctatggagcctgtcctggcattcactctgtggaccaggctggccttgaactcacagggatccgcctgcctctgcctcccaagtgctgggattaaaaggcggagacctacttgaagtcctgctcttgagggtgggggagcgctcactcaggaggaggcttcctgacctccctccagctctatgcccagcacacggagcctgccttcgctgacgacagattctccctctgtgggggaagcacttgaagagagcgcgctcctcacacacctctcagagctccatcagaatcctgcccccgtgcaaagtcttagtaactctctgtgaaatggattaggaggcgggactcagagatccccagccacacatcagaaagccacaggggaagctgatgctagcgcagttaccacccacacgaactccagggcccctcatccttgtgggagggaactgcaaagctgtggagactcagccaagggagggcagatgggatggggagtgaacattgcagagctttcagagggcagagcctggcttcctctcataggctgagaggagttgtcacctcctggccccaccccttgccggcccaatcagtcaatgtcctttggctttggggttcacagttttcaaaccacagacgggagggagtcctctgaggatgcttttttcatagaatagatcaactcctaaatctgaagttgccttttggcttcgagtgcttctgtgggtcattgctacagctggggggagagctctcaccgtttcatactttagagatagccagttaaactgggattcttctcagggatcagaaatcaaagtccctggaaaaggggggcgggagcgtgcattactggggactcagaaggagatctcagaagtccttagtcagttcggaacccttctgcttccagcttcagcccctacatcccaccttgtcctctgctctgcagggacagctcagttctaagcctttggctgcagccagcccaagctctttttcactggactgcctccttagcggcctttgtctgggggtctctttgtctggggtctctttgtctaggagacccctttggctctgtttcccagtcctcagtctctcctccctttctctgggttaggctgtcccctccctctctgcgggggctgagaggctcagcaaggggagcggggctgggttgccatggtcaccttgaagccagccgcagctggccagggcagctgctctcgggcccccgaggctggagcttggacaaagccgggaggcttcatcggcctcagatctggatccccaaaggcctgagcctggggacactgaaactcagaacctggaggtgagagggaggggatcagctcacctgggagagcaggagcaaccttggggctgggctgcctttatgagggaccaggtaggcctggaggcgtggtaggagggagaaggatggaagccttgtgccaaaacaggttggccagctggcaggcaggcggggctttggtggccagcagcctggagatgggctcaattctatctctgggccttccatcaatcttgtggttgtctttcctttctaagtctgccccccatcttctttctttcttcctccctcctttcctcctccctttcaaactccatgtctcggtctctaccctccccatatcttagtttcattccaacctccccactctctgtttcctccattccagttgccgtcccaaacgtttgctttccttctgtgtccgctccccgctccattcaatcctttctcctccctgtgcctccacctatcactttggtgccatctgtctgactcctctccctggagtcagttgtgtctctccgtgaccaccagcctctctcccctggttctccatcccttctgggtccctctcccagactatccacggctaatgtgtctaatttttctgtcctagatttatgttttggatgtcctagaattatcttcctttttttgtcatcacactacaggcctcagtttcccatttgaactatgaccagggtcttttccagctccctacccgtcacccccccccacacacacacacacgcaccagaggcgtcccactctccccagctgctgacccaacctacttccccagaggcagctgcatctcagggcaaggactgtggctagtgtgtgtcgagggcagcgagggtgggcccatctggtccaccctcctttcactcctcctgccctgcttccctgcagtggcgggggggggggnnnnnnnnnnnnnnnnnnnnnnnnnnnnnnnnnnnnnnnnnnattggacctcttcctgggcttgcagggggaaaaaacggtccagttctataccctccagggttctagggtataatgggggcttctggagttgtgagtggtgagagaaaggagcagggggctcggggagccacagaccggcacactctcggttcttggctcagctctgtaggcccctgaatggctgggatttccctctctggcccctgggaatctgggctccaagcagcacattccagccggctccagctccttttctgttgtcacttgactccgctgggccccagccccgtgtccctcctacttctccagccctggtctggggcgaggtgggcatcaccgactaggaattttccctgggagagtgaaaagggggcagaggcttcaagactctggcttcctccacatctcccatggacccttcactagtcagtgcgagtctagggcgtgcaatgtcccaacggggtgtgaggagttgaagctccgcctgtccggggcttccccggagcatctctcctgggaggaggggctgtgtgccgttgcaggtgaggttactgggaagccttggccccacctccaggcggactccacaccccgcccagtctctgcagggcccagatttcctattgctgtcttcagagggggtgagaccaacaaaaatccctccaactaaccaacccctcctccacctcaaaagcataaagcagccaggggtgggcttttcttccagtgaccatgggggctattagcaggtccttcagcagctggagcgtccctgggtttgtaaactggagacccagcctgccttggcttctccctagtggccgcttatcttcctggtagctttttctgttcttgtctgttttttctttacactctttggaaatgcttttgggtgtgagttttgagtcagttgggaggtgcaacagggtggtgagaccggcgaggttgctggagactttactgtgacctgacattgtccggggacttggcaggtgtgggggtgtggagagaggtagggctgacaggtggtgctgaatggggacagaacacctcccacagaagctcggcggtcgcccccgcccccccccccccccccccccccccccccccccctccaccatctctcccttccgtggcttagcagctctgttcgttgttttcttacgtccctgggtcttgcgttcccgtctttttgggcggcttgtgatttccagggcgcctctctatctttctcctccacccccaccgcgtcctggctccattttgcgtctctccttgccagaaaccagattctgcggctcccaccagggactgagctggctgggaactgaagaaggcttgcctgaggaggactccagagcgagtctggatggagcagggagcccagggggacccagagctgggagtgtggacctcagggctcctgagagaagagaagggagctgcagttggggaggggttctagaggaaggggacagaaaaaagtagagaataaaagagtgtggcccgtcctcaggctcgggagtaatctaggttgggagccggggagcgggcctgtgccaaaatgtagcaaagtggggaggagtgagagccaagcggggctggctagacaggtgagcccggttcccagggacgaggtggggaagcacaggaggcagggggcgcgggttggggagactcagctctgtgcgccgccttggggttttgattccccatctgaaacagaaagggccctgactttccgaaaaagtatcttctcgtagggaaggatctgtcttttcctgggtgaggggagagccgagcccccagaggacaggtgcgcttatgtagcccactgagtcatcctatcggtgctccctgggccgtgcctacgagcatgctctgttaagctgccccgccacagggagccagcctgacgcccaacctaccagaccagccacgctcggtggttgccgggttgtgccaagagacaagtcaccgcccaatgagcaacgctcctagggtccccttctggcctggaattcctgcccagcaccttctcccagccacgcccggctggcctggaactgactggctgagaaggatggaggtgtgtccagaccccagtggcaccatagggacaggtcacagtagaatgcgtgagaaagtggagaaatggccttgcccttcttgctgctctccccaccccagtcccacctgtccccacctgctcttggcttccctctggcttagtcacccatgtgggtttgggaggggcagttctctggggatcctgcaccccagggcctgagtgggattcacattgcctgccatttagtattaaacaggtgtctagaggtggcaactcactaaatgctgagatctagctttatttgtcacctcagggtgtgtgacacacacctgtaatcacacacctgaaaggtggaggcagcaggatcaagggttaaaggtcagcctcccttggcatcatagtgagtttggagacttgaactagttgagaccttgtctcaaaaaatcggccatcctgctatagaggaacatgattttcatcccagcactcaaggagaggcaggtggcaccccatgagttcaaggctgttctggtctatatagctagttccaggcccacccaggctacatagtgagaccaacaaaaatccctccaactaaccaacccctcctccacctcaaaagcataaagcagccaggggtggtggtgacacaggcctttgagccctgcactcaggaggcagaggcagagggatgtctgtgagttcgaggccagcctggtctacagagctagttctgggacagccagagctgtcacacagagaaaccctgtctggaaaaaacaaaaacaaaaccataaagcaatcaaatacacacaacaaaagatgccaaggtgtgtatggagtggataagaattgtgtgtgagctgggcttggtgtttagctgatcaggagttaaaaagaggataataacatgtgtgtgaggggctgtatggtagccggacgtgtgagcatggtacatttagtttactctagtgtttacagagggcttgttaaagcacgcgtgtgtgtgtgcatgtgtgtgtgcgcgcgcgagcgtgtgtgagtgtgcgtgggcgtgggcgtgtgcgtgtgcgtgtgcgtgtgtgtgtgtgtgtgtgtgtgtgtgtgtgtgtgtgtgtatggagctgtgtggttgtagttctgtggactgggagatggggtttaggagaagagaatgaagggcctgaggcccagtgtcctgacccttgacttgtaattggttgtagaagggccaggtgggtgccaatgaggtgaaactcctaagcctatctgattgtgggaatctagacctaggggacaatgagaaagggatggccccagaacttgtcagctatgcttcagcagatcctccgcttggcccagcgccctgctcccagagcctgctctgtttacctccagctttgtttctgccctgtctcccccagtctcctgtccctgcctggctttgtatctctgccccaggctcctcttagcactgtctggctctgatgactcatctggggtaggcatgaaggttactcaggggaacaagggccctgctgtttctacagaggtgggggtggagagtggcacccaggaattccctgccaggcttcccagtcccagcggcctgctcccctccaccatggggctgtacccccaagggactggtcatggtgccttttagttctaggctcccttttgatagccaagtggcccctggcaacccagtcagccccttcagctgctgcttcggtgatgggggtctcagctgcctcttacattcctgtcctagagcattgtgggagcagctggaggacaaagggatggggagactcccccaactcctcctacctcctggggtgacctggcttccccgtagttaagcccgccctcatctccaaggcaactcagccttctcagctgcaaggctcttctgctaccttcagtaagttgggacttgggagaacaggatgttagaggaaggagagctagggggacttgatggcaggggtgtgagaagggcagttggtgtccctccggcttccaggtgctttagaattcagtacaggtctcaggcactgtcaggtttcaggagagcatttctgtccccagaacagaggacagtggatccttggatttatatggagacttcagctagaatggttttggagagggtaaactgctcataccctagaaggaacagagagcagggggagaagttccatggggactctgacccagagggtccaggttgggctctgagtctctgtcaagggccagagaatgtccagtctgctgttctggctaccgcagtggggtagggaactccagaggactatgaagttaggcattgatggagtctggtccgtagaggtttgaggggctcaggctagctggtgtttttattgtatcttcctcagtaaaccaggtaaacttctccagggcttaggttttgaaaaccagagtaagttttacatgtaagattttacgtaaatgcatgctactgtctgacaagtttgagagtgctaacccagccaacctttctcctttttgtgcatgcttccctctgtcgccctgttcatgatctcacacagcctcgctagacatacacggacgtgagagtgtggacagacgttgtgggtttgcttctcctttgctttcacatggtggaatgattctcgtacttccgagtgtggctttccatgttaagcagtggcatggggaacacataccaagtcaggttcacactaattcttttagtttacagtaatttttagttttatgtaatgttgtgataaagtttgaagggaacctcgagtggggaccttggcggactccatggcaggcgagggtgaccgaggcagagggacaagcatgccaggcagacagagcttaagtgagaagttttattagaaagggaaggagagggaaggaaagagaaaggaggtgaagagacagagacagagagaggccagaagagaagagggagacaggagaagtcaagtctgccccaggggaaaagcgggaagtaagtgggcagggcctttcttttaaaggggtcctttgcacctgcactacacaatcatggaaccctgggctgagcagtgtactgcctgagtgcattctgccaggtgacaggggctggccagcatatatgtattataaaatactctgtttatggttgtcttgttgttttgcctgcatgtatgtttgtgtagtgtgtgtgtgtgtgtgtgtgtgtgtgtgtgtgtgtgtgtggtacccacagagctgagaagagggctttggattccctggaactggagttatagatggtgtggatgctaggagctgaacctggtcctccgtaagagcaacaaatgctctttactgctgagccatctctccagccctcactttaaaaaacatacaaaaacaaaaaacctttgttggtttctgatttgtgtgtgtgtgtgtgtgtgtgtgtgtgtgtgtgtgtgtgtgattcagagtctcatgtaacccaggctggcctcaactttagaatggggctgaggctggctttgaactcctgatctttctcctctccagtgaattgccagtgtgtgcaccacaccctcctgcctttctctcaaatgtatgtattattattgtttacttcatatgtaggggtatttgggcttacatgtatgtctatgtaccacaagcatgcatggtgcccttggaggccggaagtgagcatgagatcccctaggccttgagttatagatggttgtgaactgtcatgttagtgctgggaatctaacctggctcctctggaacagccgctgtctccccagccctttctttaaataaataaataaataaataaataaataaataaataaatgttattacatttatttgtgtgtgtgaggtcagaggatggcccgtagtgggggcgcacacctctaatctcagcatccaggagcagaagcaggtggatctctgtgagtttaaggccaccatggtctacacagttccaggacagccagtgctgtatagagagaacctgtctcaaaaacaaacaaataaaaaggggtcaattttcaccttccacccatgagtcctaaggatagaattcaggccctcgagcttgaagctaagtgcctttacctctgagtcatctctctggctctttacttttttttttcttttcatctctacatagaacatagctacatagaagcccccgcccccgccactccaaccccccagaacgccccctatgggaattcacatggcttatgtatggacatctggggacagttctgagttcttacttcgtggtgcttttcctagtccctatgtttgaaccatatgtcgtcatcaggctgctagattgctatccaaatatattctgatactacaatagcaaaaaaatggcggcttcccttttgtccctcttcccatggaagatagaacctttaaaaatactttgttggcgctggagagatggctcagtggttaagaacacttactcctcttgcagaggacctggcacccacatggtgaccacacgcaaccatttgtaactcaagttctatgagttctgcctccctcttctggccccctcagatactgcatgcatgtgtgtgtgtgtgcgcgcgcgcacacacacacacacacacacacacacaggcaagcactaatatgcataaacattttaaaaataaatcttaaaaaatactttgtcaaattaggcttgccaagtgtgtgtctcccattccagcaaattgggatgttaaagcaggaggatctttgcaagttcaagaccagccttagactgcatagtgagtttgaggccagcttggctgcaccgtaagaccctgcctcaaagaagtcagtctgatttgtattgttataattccagtgaatgtgatgattttttaaattaatatattttagacacgttggctctgttcttctgtggagtgagtgctcagaggcttgggccatttctatatcaggttgtttataaattgttcctcttatccatttataagagctcttagtttattataactattaagccctttgtctcttctgtgtgttgcctacatttttgaagccattttttttgtttgtttgtttttacttatttttgcttttgcttttattttctctattgatggaggactgggggtggagctttaggcgtgttatttagtgagcagatccctatctggtttctttgtgtgttaaatatggatcaaaacatctaccttataaagtggcgggccatgaagttacggccactgcctggtgtgtaggaggaaacagtctaaaagtagaaccacactctaaacggtgacttcttacttttatttttggccgttttactcttcttatccccaaagcagccctcctgtctgtctcttgctgtacctagatcccttggtgagcagactctcctccctatttgtcccctgcagagatgccccctcctccataggccggagggatcaggagcgatggggacaggggccctcccatctctactgctgctgcttctcttggtgacgattggagatgcagacatgaagggacattttgaccctggtgaggagactgaatcttgggtccccgaggactagagctggggagtcagagagctggggggacgctgacccatcccgtgcctgtgtccttcagccaagtgccgctatgccctgggtatgcaggaccgcaccattcccgacagcgacatctccgtgtccagctcctggtcggactccaccgctgcccgccacagcaggtacctgattctgggggttgccttgaaggagctctttaatggcttttccagtgtccctgcacaggccaaggggcttttgagaaggcccaggccatcgaggcgtacgtggtgtggtgagagcaggggttttttttggggggggaggtgggggttcgagacagggtttctctgtggctttggagggtgtcctggaactagctcttgtagaccaggctggtctcgaactcacagagatccgcctgcctctgcctcccgagtgctgggactaaatgcgtgcaccaccaccgcccggcgagagagcaggctttttaaatagacccgcgaccagttagggtacccagatagtatgaagctctgtattcaattttaagcaccccataaacaggcgtggtgtcgtttgctatgattccataactcgggaggtaaaagcaggaagaaaagaagttcaaggttacatagctaaaccggcctgagatacaagttacattgtctcaaaaataaaaaagaccgggggtcaagtgttgccctgacctccttcttcctcccaggctggagagcagtgatggagacggggcatggtgtcctgcagggcccgtgttccccaaagaggaggagtacctgcaggtggaccttcgcaggctgcatctggtggctctggtgggcacacagggccgccatgccgggggcctgggcaaagagttctcccgcagctaccggttacgttactcccgagatggccgccgctggatggactggaaggaccgatggggtcaggaggtgaggctgggagtggaggcacctgtgaaggatgcattcttcttttcgccatactctaaacagcatctgccacgcccatgcgctagcatctccagctccagactctgccaggagcaccacccaatgttggcagccctgctgcctcttaacaaccattggcctctgcagtggactgcagtcctcactcaccccaaatctgttcctctttttccttccttccttccttccttccttccttccttccttccttccttccttttctctttctttctttccttccatctttctttctttcttccttttttttcccgagacagcgtttctctgtagctttggagcctgtcatggaacttgctctgtagaccaggctggccctgaattcacagagatccgcctgtctctgagtgctgggattaaaggcgtgtgccaccaacgcccggcccctgttccctttcttgttctcagcttggggaaatttaccgtcccccccccaccccatcccatgaccacaatggcattgatggctcgctccctctctcagctcctctctgtgcccacctttgtggcatttcctgaaccctgccactccatcccacctccacccccagctctaagccacgagtactttcatccagctgaatgaaatctaaaccgttcatcctgcctctgtccctttctgtccactacttatcagacctcttcctcagggctacaaaccgcacacacccagctctcagcccagcactggctttggctctaccagaaaacgaaaacaaaaaaccccaattctttgagtacaaagcacttcagttaacccagctccagctccgggcaggggatctcaccctcctctgatctctgcaagcatggcatttgtgtgtgcaaacccacacacatacacatacactgtgccatcctgcctttactgctgtgtgtggaacaaaccaggctctctccccacagtcgggccacacagttgctgctctctatgcctggcaagctcttccccagacaccagaggctccctctcccagttctcctcagagatgtcacctcctgcagatcttggtctggatgcccacctcacagctctgccccacacactgcctcttgttcctcacagctgtcccgtgaggaggggttgacttctccactgagatcatgtccggtccagagtgggcacttggtcagctgttgaattgaacagagggagtggggtgaagcaggcaaggatgctgagatgggattctgcggaagggtggagccagctgcatgagtggcttggagacatgtggaaggaagtaggcaggggagagggtcaggggaggcatgactgagggcagacctccagagccgccagaggcatcagtggccactggtacagaacctcctttcaaaatggccagctgcgtcccccagtacccttcaccagcctcttggtggctcctggagcctgagccagggagccgctgaaggctgggaggttagatctgacctgaagccctgcccactcagccaccctttttttccctgcccgcaggtgatttcgggtaacgaggatcctggtggagtggtgttgaaggaccttgggccccccatggtggcccggctggtccgcttctacccccgggctgaccgagtcatgagtgtctgtctgcgggtggagctctatggctgcctctggcggggtgagtaggtcagccccacaagaacccctttccagtcctggaagcgggaaatagagactggggggggggtggtatcagaggttgtcttctgtcaggaagctgtcactaagagaggagagaggggactagacagtgtttccttctccacaccagtaagaaaggactgcaatcgctaaggccaggtgcctccctctaactccccctctttccatccttccagatggactcctgtcgtacacagcccccgtggggcagaccatgtacttatctgaggtggtgcatctcaacgactccacgtatgatggacacactgctggcgggtgagaggggtgactgcacggagcttgggatgggagaagggctgtgtgtgcgtgcgtgcgtgcgtgcgtgcgtgcgtgtgtgtgtgtgtgtgtgcgtgtgtgtgtgtgtgcacgcgaatgtgtggggggggggtatgtatgtggtatgtgtatgtgtgtgtgtggtttatgtgtatgtggtatgtggtgtgtatgtggtttgcgtatggtgtgagtgtgtggtatgtatgtgtgtagtatgtggtgtgtgtgtgcgtgcgtgcgtgtgggggggtatgtatgtggtatgtgtatgtgtgcatgtgtgtggtgtgtgtgtgtgtgtgtggcatatgtgtgtgtggtatgtggtgtgtgtgtgtggtgtgtggtgtgtgtgtctgtgcccacacgcccacgtgcatgtgaggagatgtggagtagcagtagcctcggcagtgaaatggaaggactggggagaatgccagttggggggtcttgaaaggacaggccgggaatgaaggatagtaaggtgaccactagtccaaaggacactttgtatggattagaaggaggcaccccgtggtccagacaaggatggccttgtaagagaacctgcagggcatccggaactcctgcaatcccagcacttgggaggtagaggcagtagcatcagggccttcagtttgttcttgctacatagcaagttctaggccagccggactccctaagccactgtctataaacgaaacaaggcaccgcccccagctaagaatatctgttgggaattgtcacattaaacacacacacacacacacacacacacacacacacacacacacacacactcacacacacgctatagacggaaccgtgtgccttcctagcggcacttccgcatggcgtgtgcctcacagagagtaccttgtgatactttggggtgtgatgcacgcgagagagggagagtgttgagcatgatcttgggctgggaaaggagagcgggtgagaatcaggctgttcaggccaccactgcgggtgtgtgtgcaggacctgcactgtccctatcatcttccctctgagcagccctttcctgttccctccaatcaggctgcagtatggcggtttgggccaactggcggatggcgtggtgggtctggatgacttcaggcagagccaggagctgcgggtctggccaggctacgactatgtgggatggagcaaccatagcttccccagtggctacgtggagatggagtttgagttcgaccggctaaggactttccagaccatgcaggtgagcgagctccatctgccctcccgaggacaccagtgccaggggaggtgctgctgctgcggggtttcctggccttgaatcagtcnnnnnnnnnnnnnnnnnnnnnnnnnnnnnnnnnnnnnnnnnnnnnnnnnnnnnnnnnnnnnnnnnnnnnnnnnnnnnnnnnnnnnnnctttttaaaaggggccctgccatggcctgggagggagagcctgtgcgccatgccttggggggcagcctcggagaccccagagccagggccatctcagtgcccctgggtggccgcgtgggccgcttcctgcagtgccgattcctctttgcgggaccctggttactcttcagcgagatctctttcatctcgagtaagccccagagtgtgcctggcttcactgcttaggtttacctgttgatcctgtggtgtccccagcatatggattcctggtattatatcgcctgtcacctgtgagatttcccaaactagggaagaacacacagagtctttttccttgttgttgtttttgttttggtgttttatagattcttttttatcttattgttttgctattcttttttaaaaatctgattattattattattattttataattattatcattattttggtttttcgagacagggtttctctgtgtagctttggagcctatcctggcacttgttctggagaccaggctggcctcgaactcacagagatccgcctgcctctgcctcccgagtgctgggattactgattattctttttgagacaaagtctcaccatgtagccctggttggcctggaactcatagagatatgcctgcctctgccgtctgagtgctggcattaaaagcatgtgctaccacacccaggtagattctttttttaatttatttttttaagattctttttaaaagttattatttttttgagacaggtcttatcaggccacctggaccggcctaaatcttgtgatcccctgtctcagcttcccacacattaggattatagatgcgtaggatccctgttgtccccacatctctcctttcctgtgtgagtccctcgttcctggtccatcctgagtgagggtgacagaggtcctgaaagacttcacccagctgaggaagagcatcttctctaagcctgcagaccctcgaggcccctcccttagttcccccctccccgacttccagactgctgtaccaataggctggttccgattagtttcctagccaccctgtctgtcccctcacacccgtgtccccgcgggtcccccactctgactccctcctctctttgcttccttctccccagatgtggtcaacgactcctctgacacctttccacccgccccctggtggccgcctgggccacctcccaccaacttcagcagctttggtgagcagcccttgggcacagttcctccggggcctccccctcgggtgcggcaggacgcctgctgtgacgctgaccattctcctctgtcagagctggagccccggggtcaacagccagtggccaaggcggaggggagcccaactgccatcctcatcggctgtctggtggccattatcctgctgctgctgctcatcatcgcgctcatgctctggaggttgcactggcggcggctgctcagcaaggtgggcggggtgttgtatttgtgggcagggacgggagcgcagtctggccaggtaggatctataggacttgacttcagaaacagagaccgctctcaagagcaagcatgggggctgaagagatggctcagtggtgaagagcactggctgctcttccagaggtcctgagttcaattcccaggacccacatggtggctcacaaccatctgtaatgagacatggtgccctcttctggcctataagcgtacatgcaaggagaacaccgtacacacaataaataaataaatcttaccaaaaaaaggagcgagcaataaataaatcttacaaaaaaaaaaaggagcgagcacggtgtgtgagaagaagacctccagagctaaggaggagcaagagaatttttagagggtaccctcagaggggaggagaaaggagaacaaatctccttgcctcactttgtgtcctccagccaagctctgtccatctgggctcctctaaccaaagctggagaagagcaagacccgtatgccctggacttcccatgtctgggagggtgatgtccattacggttgataattagggcctggtcagatttggtttgggtcctagggggcgacctcagggaagtggggggggtgccatgaggagagatggattctgatccaagcatccaggaaaccatgtaagcagtggtttattaatgttgtctaatcccacaacaaggctgagcgccgggtgctggaggaggagctgacggttcacctctctgtccctggggacaccatcctcatcaacaaccgcccagggccgcgagagccacccccttaccaggagccccggcctcgggggactccaccccattctgctccctgcgtccccaatggctccggtaaggcctgccttgttccgtcccgccttgtcttccgcctgtgtgcttgttgtagcccctccttctcctttcctgtctatacccagttccggtttgtcttcttatttctatgtacctccatacggtctcccccaaggttttcctatgtattacccagaatgccagtggtctcaccctgtcattgtgtcacacatttctgttgtgccctcttgtctccttacccctcaacttttgttccatccatccatccatccatccatccatccatcccacccatccatccaaccactcatccagccacccatccatcctaccatccatctatattataaacccatttgtctctccagcatccagcactcagatggcagttttagtactcacccatcatccactcacccgtccatacatatccatcgtcctttcagctctccattacccttgacagcctgcgctttcagccccataagccccagtcttgcctgattccaggtctccctgtctgtccagcctcgagtctcatcccttccccgtgtctcccccctccttctcccgacagcgttgctgctctccaatccagcctaccgcctccttctggccacttacgcccgtccccctcgaggcccgggcccccccacacccgcctgggccaaacccaccaacacccagggtaagcccctctgctgctgggctctgcaggctcccgtaccgctactgggcagggaaaagccctcacaccttgcactatgcacttttccactgtggccttttctttgctctccggagctccccatccggaagctctgccacccctggagccaaggggaaggctgctggtcctagctctgtcccctcctcctctcacactgctctccagagctagagaggatgccgctgtagcccgctcttctgtaactcctcctttattctcccctctctctagagctacaaggaggagggcctcaccctgggcgcttgtcctctcccccctgtgtcctctctctgcagtcccagaggtgaaggctcatgctgcccctcctgtctgctccccctttctctgtgttgctttctcatgtggccctttccccagggcctagaggggcagctctgcctccctcctgtctgtaaacatcttgtctctggggtctgtgaggacctgtcaccctctcccctcaatgtgtgccctgtctcttcctgtctttgagcttggtgtgtttgggattgtcagggagggggggctgggctgagagcagcaggagctggtggtctggaggactggaacatggaggagactcgtggcttgcacctgcttcagatgctgggtggaggagggtggaggaacccctcttccggcccgacttacctagtggtcagggttgtgccaggagaccccggagggtgaaattttctggtaccttctgcttaactgtctgtgctgcccccaaagcttttgggtgtgaatctcgattctcacacctgccttctcctgtttgaggctggcagccgggacctctgggagactggggcatgaagaatcgtgctgccagggctgctgctggtggctcacgctgtcttctctccctcgcctctccagcctgcagtggggactatatggaaccggagaagccgggtgccccgctgctgcccccgcctccccagaacagcgtcccccactatgccgaggctgacattgtcaccctgcagggcgtcactgggggcaacacctatgctgtgcccgctctgcccccaggggcggttggggatgggcccccccgagtggatttccctcggtcacggctccgcttcaaggagaagctcggcgagggccagtttggggaggtaaggagtgtgcctgcccggcttcgactgtgtctagccagactagggctttgtgggccatgcttgcatgcttccgtggccagacagcttgtcatttgtgctgtgacaccccatctgacactgtggcctgggcgggcctcgtgacctagtgaatgaccttcattctccaggtgcacctgtgtgaagtagagaaccctcaagacctggtcagtagtgacttccctatcagtgtgcacaagggacaacccttgctcgtagcagtgaagatcctccggccagatgccaccaaaaacgccaggtgagacccgcggtggcgatagtgataccacatgccagttcaaatggggacgttcacacagagacccatgcgttagatggagaactacaacttctgagatcagcagagattagccccctaaatggttatccgatcccaagcgggtcagccttaaaacccatacacacaagcaacactaaatggatccggcagactgcattcatcgatgtattcacacacgagcacttagcagtaataactgaggaatgagcggccacagatttgaaagagaatgaggtgggggcggaggacgactcaggagaggttggagggggaaatgatgtcatcattaattaaattttaaaaatagatttttttaaatgctaggtaagggctagggatgatgtctagaaaggcggggcagtgggcgggggaacactgctgtggcacttctccagccttctccctgcttctccaggaacgatttcctgaaggaggtgaagatcatgtcccggctgaaggacccgaacatcatccggcttctgggcgtgtgtgtgcaggacgacccgctctgcatgatcacggactacatggagaatggcgacctcaaccagttccttagcgcccaccagctggaaaacaaggcagctcagggggttcctggggacagagagtctggccaggggcccacgatcaggtaccgctcactgaggcagggacttccgaagggcgccccaagtgggtctcctgaccctccctaagctggggagggggaggggagcgtgggctggggattgacctaggacgaggaacccgtgtccatggtcatacgtgaacgaggccaggaaggctgagatctcaggaggagcaggtgcagagacttggagcctccatgaggtccctcttgccccagcctcacaaaccatgaacttctgggaccgttgggtgggtggagcaggacctgccccattccaaacctcttccctacctggatcaggagcgacctatgcagtggttgaggtgtgggtcggctcccctccctctcccagacagaagtgtgcaaagtggggaggcgtctggactgccctgtgacctcctctttgactccttcactcagctaccctatgctgttgcacgtgggagcccagatcgcctccggcatgcgttatctggccacacttaactttgtgcaccgggacctggccaccaggaactgcttggttggggaaaatttcaccatcaaaattgctgactttggcatgagccggaacctctatgctggggattattaccgcgtacagggtcgggcagtgctgcccatccggtggatggcctgggagtgcatccttatggtgagcagtcaaaagaagcaggctgggagggggcactggctgcatctcctcatttggaagtcgagggtacctctgtatcaaggaactgggaaaaggaggaagaacagtgtgtgggaaaggggatccaggagccaagagtgggctggaggggtaagagttggaaactggggatagaaggggtcgcggaaggatagaggctcagggccagcagggggatggttggcagagaaggacagggtcagagtagagggaggggaggcaggaacagaggaatggctgagagggggtcgggtagaaggacagcctagggtgaggtctttctctgactttcttgcattctcgtgtgccagggcaagttcacgacagcaagtgacgtgtgggcctttggagtgaccctatgggaggtgctgatgctctgccggtcccagccctttgggcagcttacagacgagcaggtcatcgagaacgccggggagttcttcagggaccagggccggcaggtcagagctgagggagggatgtggcttgtggtaggggctgtgtggtgacaggaactaaggacgcctgccctgcctctcattgtatctcacaggtatacttgtcccggccgcccgcctgcccgcagacactctatgagctgatgctgcggtgctggagccgagagcccgagcagcggccgccctttgcccagcttcatcggttcctggcagatgatgcactcaacacagtgtaaactcaggaccttgcagccctttcccgttgggagccatccgggggaagctggacactaaagtgagagaagcctatggcaccctaccccaccccaccgtctcctgacttgctatccccgagaggcagcatttctgcaggtgggctgggcctgccccaggagctgaagcctctgtcactggatacacactcccttcctgttttcttccttccttccgtctcccgagcaccacccacccagctggctctgtggttgggatcctgcctgacttcttccagccatccccaggggaaggatgggggccaatgcaaggcacacactggactaggcccactggagtacctgggccccactggacaacactggtctctggggaggcggctgtgccccggcctccttcctgtcacacactggactctgccagctgagaaactggggggactcggggacaaggaagcccaacccctacagtggtcctcagccctggcttccttctgttccgcccctgacacactggacctgggggtgatccctgccctgatccttggtcgcacaccctccttcccaccctctgtgctgcagctagaacgtctcaaagcctctatgtttctgtgaagtaaatactaggatgggggacaaaggctgggggtggggaatctattgtagctgccacattggtttttctataatcacgtgggtttgtacattttttgggggagagacacagatttttacactaatatatggacttagcttgaggcaattttaatctcctgcactaggcaggtaataataaaagttgagtttttccacagccgtgggtaatgtctgcctcctcccctcactcccagaccactctcttccctttccctagtccgtgtagtccagccctgttctgttctcatgccatccatgcccatgtcagttgggccatgacagcccgtccactcggattctctgcagggagaatataaatagtggtgtccgatgggggctggagaggtggctcagtggttaagagcaccgtctgctcttccagaggccccgggctcaatccccattgaccacatgacagctcacaactgtctgtaactctagttccagggggtttaacaccttcacatactggcaaaacaccaatgcacattaaatgaataaataattaaaagcaaataaataagcagtggtgtcaagtcaactaggagtttcactctcattcacagagagcagagctagattttagtttgaggttatcaacaataaaggtgtgatttcttttccttgtccaaatcctaggaccctaggggctggagagatgtgggtgacctttgggttaggttttttttttttaagattttatttattatgtatacaacattctgcttccgtgtatatctgcacaccagaagagggcactagatctcataatggatggttgtgagccactatgtggttgctgggaattgaactcaggacctctggaagaacagtcggcgctcttaacctctgagccatctctccagccctgggttaggttttgaaagcatgcatatgtctctagggtttgaactgtctagtggaagccatacggatgagcctggggtcatctcagtcctacaagtatgagctgcagccaccgtgaaagccttagcattcactttgggtggtaagcaaaaaacagtctatttgcaggtttggagaaagcatagccattcctgagaaataaggaccctggggttttggctgacgatattcacaaagtgagcagagtggataatgagaggacaacagtaaagctaattaaatctgaggttgaattactgggctctcagggcccaggtcacacatctaacagtctcgttaaagctacggaggtcagactactgccttaagattaaaacagacattgatgggttagagttcagaggtcagactttagaataataagcaatggaattcctggcagggagccatagctcccagagctctgtgcccagacttgctctaagtaagctttagaatgctgtaactctaggttcctgtggcgctcagaccagcgtgtccaaacctgcccttttcccacagttgtagcagcagccactctggaggatgagtccagtccagcaggaagctcataggtctgcctgccagatctttgttctttctcgacatttccattgccctggcacatgccgaaacgcagacatctcctaactagtctcccaggactgcttctgtcgatctctggtttgttttcagttctgccaccacggtgacctttgtttggagtctggatcttatggtcttaaatagcccagactttgtctcaaacttgctgtggaacaggggaccacctggaaccgatgcctctggcttcacctcctaggtgctggaattgcaggcgcacagcaccacacctggtcctctgtggcgtgcattttttaaattattgcatttgtttatttagtgtgtgcatgcatgtgtgtggagctgtgtatgcattgccacagtgtgtgtgtgtgtgtgtgtgtgtgtgtgtgtgtagaatttggttctctagttccatcatgtcagtcctgggtgtaacactcaggtgtggtggcaactgcttttacctctgagccatttcactcatccctttatcacatcttgcttattttatgtatatatgtgtattttatatgatgatgatgatggttaccatgctgggggttgaacccagggcctggacacactaagcgagcactctacctctgacctatactcctagtcctttttctggatcctgctgttgcttcgttcaggccgggtttcactgagtagccacagctggcctggctgcctatgtagatgaggttgtccttgagcacagagacctgtgggcctctgcctcctgagctcacacacattgtgtgtgccaccatgcccggctgttgtttgctagcaggatctcactactaaaagtcctcctgcctcagtctcctgaatgcttatattcgaagcgttttccaccaagtccatctctgattgattttttttttcaaacaaagacagggtttctatgtagttttttggagcctatcaggctggccttgaactcacagagatccgcctgcctctgcctcctgagtgctgggattaaaggcgtgcaccaccaatgctcggcttctgattgattttttaagaacagaaccttgtccaaggctggctgtcctgttcagcacactctcctgcgtacaatactgtcctttccgtttccccgaggccacagacctccccctggcatgtggcctctgcagcgtgctgttgtcctggaacagtgttctctgttttttgtttttttttcttgtgttgccagcccttcaacaatctcatctggacaggtcagctctccagtgttgctcttcagcccatggatctcttcttagttcccttgcatgccctatttcacatgtatttatgtgtgtgggtccctacgacatgtctctcctcggctgtgagattgtaagctgcaaaacggccaatttaaggaacacagggcttaattcatttaaaaaatttcaagggctaacataaaaagtatagagttagggaagcatcattaggttctctctctgtctctctgtctctctctctctaagacagattgaagatctcagtctgtgctccgtgtagcctcctctcctgaattctgcaaagcagagtcaagttgaaccacccccatggctttcaccttatccatcgaggcagggtttcccattcaccccgagttctctgatagggatagttttctagacagctgctttgagaatcccatctcatacaggcgggtggctactcccaatattttatgtgggttgtgggggctgaactctggttctcttacacttgcatggctagtgcctttggtcacttagtcaccttcccagcctaccttccatgtatgtatatatcaaagtttcttgtgggctgttcaagccacttagtaattcgcatttctccctctgctgatgagtaggtagggtgtagttcaaggccttagtatacatatgacccctcctttatcagggttgcccagccttccactttgttgggatgatttgtgttatatctaaccagctgctgacacagactggtgagcctttgccattgggttcaggaagtgtctttgttatctctgcatctaatctattctatggatgaagatttcagcatgatacaattctgtatttcttttttaggtttttcgagacagggtttctccgtaaaacatcattggctattctggaacttgcttttgtagactaggctggcatcaaactcacagagatctgcctgtgtttgcctcatgtgttttgggtttaaagacatatgccaagacacacgacttgaatgacgcaattctaatggtggctttactgggtcaaagaataatcatattaaaattgcttgtagaagctggggtggcaatgcttgcctgtaatctcagctctccagaaatggaggcagtaagatcagaagtttgcagcttgccgggtttttggttttgtttctttagacagattctctttacggctgtcttgcaactctctatgtaggacagcctggccttgaatttacagaaatctgcatgcttctgcctcctgagtgctgggattaaagttgtgctccaccaccactcctgaccctcctgcctccacctatccacccagtgccggattacaggctcataacgccacacttagctttggttttttttcttccttttcttttctttttttaaaaatactttatttaactttattttatgtgcattggtgtaaggatacaagatcccctggtactggagttacagacaggtgtgagctgtcatgtgggtgctcggaatagaacccggatcccctggaagagcagacactgctcttaaccactaagccatctctccagcccccttttcttttctttaagattttattgtttcttatctagccgggcgttggtggcacacttctttaatctcagcactcaggaggaagaggcaggtggatctctgtgagtttgtggccagcctggtctccagagtccagagccagtgccaggataggctccaaagctacacagagaggccctgtctcaaaaaaaaaaaaaagattttattgtttctttcagttgcttttgttctttagcttatttgtttgtttgtttatttatttatttatttatttattttttaaaaaaaggttttctctgtagctttaaagcttgtcccagaactcactcagtagaccaggctggcctccaactcacagaaatccatccacctgtctctgcctcctgagtgctgggattaaaggcatgcgccaccaccgcccagctcagatttcttattcttgttgggtttggtattctgtgatataagaataacagaatttaaactgggcagtggtggcaccgcctttaatcccagcacttgagaggcagaggcagggggatctgagttcgaggccagcctggtctacagaacgagttccaggacatccagggttacacagagaaacccagggatacacagaaacaaaaagcaaacaccagaatttgccccataagaattggggaaactatagttgaccttagttgatgcctttcattaactgtcctttctcccagtaaattcataaataagagtaaaccgcagctttctttttaaaattgtaatggagtcttctaacttcttgggagttggaagggccgtggaggaagagattaagactgagcatttagtagccaaataagggcgaactggactgtgttaatccctgcctcgtgcaaatgctgtgcatgagaaatatcagaggtctagaaacccaggtttgaggtctctaaatctaacgcaccacccctgagcagccgtgggtgcgcctcctgtgtgggcgggacagagagactcgctttagttgctagggaaagggagatgcgggaccaaattatctgtttttatctgtcttagggtgttcttgggggaatccaatgaaaagccagcttctctcagttggtcttccatgctgtgcctttcgggaattgtagtcaaaccttccttgcgttgctccgatggagtcgaggagaggactacaattcccaccatgccaagcggcaggcgagtgcatcacttattctcatcccctttactcttcacacttaaccctgctctcccttcccattggactggtttttgcctggctcctgtctgtgaaagacttcctggttctcccaccgttttttctcgtctttttatttccagaagccaatgcgagacattggctctgattaagcgacggctcgtgacccggggtacgcaagggagatccgagcggtaggggctgtgagagggcgtgaagttggcgtgaaaggaaagccagggggaagtgcggagcttgcaccgcgtggtctcagtgagaagggtgaagctggcttggagggaaagggatagaaagggatttagattggtgagcatggaggtaatttatagccctgtcttgacagattaggaacttgtagactgatccgaccaggagggtggaggagagaaagagaaggctgtgttcaaattagcatctttgtcactgcttagatgaatctggggcgtcgttgataatgcaaaaacaattttgcaagtatggaacaataaatgatgttgtcccttgtccacactggtgaggatctggatttggtcctcaggaccgtacacaaagaaggaaaatcccaccagttggagactgagagaagattgaactttagaagagaagcgggatgaaaggccagctatgttacgttcctgcaatcccagaaagttcaaagtgatcctgaggggcttgatgaaggagcaggaacatgcggggtttgggagcaataggtgacgagtggtaccagagaggaaaggtatagaactgatgggttagagtggaccggataggtctggagtcagagtgacactggcctggattgtgggggtgtacctctgacttgtgtacctctcaggtgatggagatcacccctgcaaggggtggactgaaccgagcacacctacaatgcaggaatctacaggagttcctagggggcctgagccccggggtgcttgaccgcttgtatgggcacccagccacttgcctggctgtcttcaggtgaggagcccttcaaagcgaggaccgtggtttggagactgtaacgggctctgcagagtggagttagttactcatggggagaggcttagcctagtgtgactaccagcctgttagagattactccaaagtgtggcaatctaaaacgaggtgggagatggggtgagatgcctgagaggcaaaagagggcagaggtgcaggcgtgaggcagcttctggtaacatttggcctctgacctttacagggagctcccttctttggctaagaattgggtgatgcggatgctttttctggagcagcctttgccacaggctgcggtggccctgtgggtgaagaaagagttcagcaagtgagtcccaagtacagcctgctgcccggtggctgcattctcagactgcacatccacgactcacacaggatctaggatcaaacctagggcgtctcaacagtctctgctctacacagggaacacccccccccccagagtatacttgcagtgtttccccttttagagagttgtgattttctgtaactaactagttgtatgctaacaaaaaaaaaattgaaaagacaaaagaaaatgaaaaaacagctccagaagttgggaggtagagacaggaagatcagaaattcaagggctacatggtaagtttgaggctgtctgagacttcataggacccttttgaaagaaaaagaaaaaaaaaaaaaaaaaggagggggattgacttagaaaacaaaacagagagaaacaataataaaaacaacgaactaggctccatttagcattgtagtacaggcatctgatataagaaaacacagctgcaccctggaacactgttccaaggaccaccagtttaggtagaaatggagccccctggaggtctcctttctgcttgtgacctgcccctcacctctgcttctgtccagggctcaggaggaaagcacaggactgctcagtggtctccgaatttggcacacccagctgctccctggtggactccagggcctcatcctcaatcccatcttccgccagaacctccgaatcgcccttctgggtgggtatgtagtttccctctcttcctgagctaggccaggggaactgctgactacagggatggggggggggagctccttcaaaagtgcattggaccaggtgtaggtgtagggtgtagaaagtgtccccttctcatggcctgtggggaagcaggaagcagacagggctccttactcctgcccattctggccacaggggcaaggcctggtctgatgacacaagtcagctgggaccagacaagcatgcccgggacgtcccctcacttgacaagtatgctgaggagcgttgggaggtgaggatccggcccctgtgtgcctccgctgggcccccattcccgggagcccttgagacccctgtctgatcctttcttctctaggtggtcctgcacttcatggtgggctctcccagtgcagctgtcagccaggacctggctcagctcctcagccaggctgggctcatgaaaaggtgaggaggggagggcacagccactcgggtctcaaataaagtgggtgcctggggttaggagggagtgaagggnnnnnnnnnnataggtgtaaccagaaacgggtagcccttctgtgcatgtcgctaccgtcgcctctctccatttctagtgctgaacctggagagccaccttgtatcacttctgctggcttccagttcctgctgctggacacgtcggcccagctctggtacttcatgctgcagtatctgcagaccgcccaggtacgagccagggcctagggcagtgtgcccgatcttctcaggtcccactgagtcacaaccaccccagactctgcccgtcactgcctcatcccctctctcatgtctccttttgctctgcccctttctcctcagagtcggggcatggacctggtagagattctctctttcctcttccagctcagcttctctactttgggcaaggtgagtaggggggtggaggacaggcaggtaaagagacgtcatggagagatagaatgatcacagaactacctgagaaggcaaaaaaagggggaggggtgcagggggctgggcggggagtgggaggacgagtcacagcccccagctggccatctcttcccccaggactactctgtagagggtatgagtgattctttgttgaacttcctacaacacctgcgtgagttcgggcttgttttccagaggaaggtacgcacacccagccacctggctttgaggagagtggggtgttggggtgcagcagaaagcccttgccaggcccgagtgcttgggtcatttgagggggggagttaaaggttggtggttttgcactgggggatctgatgtctaagaggaagctgtcaggatggtgacctgagagaggactgtatttccccgtgtccttccagaggaagtcccggcgttactaccccacacgcctggccatcaatctctcatccggtgtctctggggccgggggcagtgtgcatcagccaggcttcattgtcgtggagaccaattaccgactgtatgcctatactggtgaggctggaggttatggccgtgtgtgtgtgtgtgtgtgtgtgtgtgtgtgtgtgtgtgtgtgtgtgtgtgtggtttaggagccctctggtatctcttctaacacctgagggcagggctagaggaaggcaggcatgggcagcctcctcacggctcttcacccctgggccagagtcggagctacagattgcgctcatcgcacttttctctgagatgctctaccggttccccaacatggtggtggcacaggtgacccgggagagtgtgcagcaggccatcgccagcggcatcacagcccagcaggtatccctacttgaagtggaggtcaaggtgggaggaggtacccccgccatgggagcatagcctcaggtctgtcaggtccccgtgtctaggcaaatacaggagatgctgtcgcagtggcattcggtgactgccctgatggctttctgcatccttgtgtcttcccagatcatccatttcctaaggaccagggcccatccggtgatgctcaaacaggtatggatgggtaccaggatgctggaggctggcagcctgggcacccagcaagaagaggatgggtgagagcgggtcagccaacccacagagactgctttaggcacttgccctgggtcctatagctccgccccttgtccgcccgcagactcctgtgctgcctcccaccattacagaccagatccggctgtgggagctggaaagggacagacttcgtttcacggaaggtgagtggcctctgctgacctcctaatcttggtcactgactaaagaggtaaggtcagcaacttggccgcgatgagtgagaagggtcttgtgcattttttattcccttcctccacccccaccccgagagggggagagaaaagcccgtcctttactgtgatatatcggtagcaggaactatgtcccaaatcggtgcggtttggatcaaactagccaggtgagggtaggaggcagggaaatccagtcatctccccgggtaggtttgcatggttttttcttgtggtattctgttgtcttttcgaacgtctggatgccacgggtgttaaggttatccacagtgatccgtagagaatccgttcttaaaactgtggcctgctgccccagcggagacgccgcccagaggggaggggccatggccaccgcagcccctctcacctcctgcccgcccacccgaccccaggcgtcctgtataaccagttcctgtcgcaagtggactttgaactgctgctggcccacgcgcgggagctgggcgtgctggtgttcgagaactcggccaagcggctgatggtggtgacgccggccgggcacagcgacgtcaagcgcttttggaagcggcagaagcacagctcctgagccggaccggcggacgggcgagcgagcgagcgagcgggctggcagcttcccaactcaggcgtattttgtttacacaccgggacatttcttgtttaataaaattaacggaaaaaaaaaataagcggttccagacacctgcacgcgttttcccatccgaggctgtgggacccggggagccagtgtctttttcgcacgcgccggcgggttcccgcccccccccgnnnnnnnnnnnnnnnnnnnnnnnnnnnnnnnnnnnnnnnnnnnnnnnnnnnnnnnnnnnnnnnnnnnnnnnnnnnnnnnnnnnnnnnnnnnnnnnnnnnnnnnnnnnnnnnnnnnnnnnnnnnnnnnnnnnnnnnnnnnnnnnnnnnnnnnnnnnnnnnnnnnnnnnnnnnnnnnnnnnnnnnnnnnnnnnnnnnnnnnnnnnnnnnnnnnnnnnnnnnnnnnnnnnnnnnnnnnnnnnnggcagcgtgcccgcccgcaccccgcgtcctcctgaagccgaccccgaccccgaccccgactgcttcccaaacactcccgatgcctcatttacctctgtcccctctccggccaccgctctgggcgctgaggcccgcccgggggctctgcaagtcccagcaactttgtacccagccagagctccaaggctcacccctcgcgcggaggaaccgtgaagccaaacagaagcgcctgcgggagaagcaggcggccctggaggccgggctagctgagaggagcaaggtcaggggtcagcccttgggtcttcaagacttgggaaggggctgaaggagactggtgtactgggaattgcaaagcacacacacacatttccgccttcctacagtgtgtactgggaattgcaaaacacgcacacacacacacacacacacaaacgcacacgcacacacaccatttccgccttcctacagtcacctgcagtgccctcgaaagcctggagtcacaaggaggtagtattgtatgaaatccccaccgagccaggtgaaaagaaaggtacgggttttttgtttttgttttattttattgctctttggcctgctgaaatgcagttcagtagtggatctcttgtgtttgtacagatgtttctgggcccctgcctcctgcttacagtccccgatatgttgaggcggcctggtaccagtggtgggtgcgagagggcttcttcaagccagagtatcaggttagtgctgggcctatgaggtcgctaggaccgataagcagcccccccaacgtggtgggcatgggtcagcttcacagccgacctttcttttgtcccctggcttcttcaggggttttgcttttcccatgttggattttctttgaaattctatcatcatcatcatcatcatcatcacttggttctttgagacagagtctctgtgtagaccaggttgtgctccaaatcaaggagatccacctgcctctgcctcccaagtgtgggattcaaggtgttaactaccacacctggcctccttgaaattctttttgccccgagggcgccagagggtgctgttcctcctcgggtaacaagcagtcctgtctgtgcctctgactaactcattccttgtaggcacggctaccccacgctacaggggagaccttctccatctgcatcccaccccccaacgtcaccggctcgctgcacatcggccacgctctcacagtggccatagaggacgcgcttgtgcgctggtgagaggaaggggggctgctgcaggccctggagggcaggttgaaacgaatgagaagtgagctcaggggtcccttaccgtgtttctgcctcaggcaccggatgcgtggggatcgagtgctgtggatccctggctcagatcacgcaggaattgctacacaggtgggtcttttgtcccatttccttttttaacttggttgacggagccgtctttatccgaagcagcttggctagcttttcctttgcacttggtctcacttcaggccgtggtggagaaacaactgtggaaggagcagggactgaggagacaccagctgagccgggaagacttccttaaggccgtgtggcggtggaaacatgagtacgatggcagatggcagggccacttgcatatcgggctcagtctttgcttgccccactcctgacgggtatcattcggttcttcctgaatgcctcagagcagaagatctggaactctgagcattggatagacaggatgtgtgtgtgtgtgtgtgtgtgtgtgtgtgtgtgtgtgtgtgtgtcgctatgttcgtgtcaggatggacacactgagtgtgtgtaatggatggatatatgcacatatgtgtggggttttttgttttgttttgttttttaaccttgtttctcttagatttcaccacctctcccgggcacccgggcccttctccttccatatctgttgtcacatgcttttgtctctcccacttaattacatttttcacaaagtggctgctgctgccaggcacacacaacccatggcccatgggcctcatgcattccagcacagcttgtgaattgtgaacttacctaaaacagtttggggactttgtgtgtgtgtgtgtgtgtgaatttttttctttattgtgatggagatgtcatgttacagtgttgtgcaaaataaatgtatgtatgcgctcacaacccatggactccagcttagaggtgtatgtgtgtgtgtggtcttataattcaggggccacagcttggacaccactgggtgttgcccaagacaattattcatcctgtgtggctcggagaagccaaaagtttagacacccctacagagacctttgtgtagctgttaaagctggggaaagccccaccctgggtgtggtcctgtctccaccagcttccagactctgcggggcctctgccattgcactttatttcctctggtacctggcactggtgagagcatccttggttagcgtgtgggaggtgctctggtcatgtgtactgacagaaacctccggcacaggaaaggaggggagatctatgagcagctgtgcactctgggtgcatctctggactgggatcgagagtgtttcaccatggacgctgtgagttcatgttatcgtccctgtgggttctttggggagaggaacgggaatccctggttcagctgagggaggagtccggtgtggacactcaggccattccagggctcctcagcagctgtgacggaagcctttgtgcgactctacaactcagggttgctgtaccggagccgtcagcttgtcaactggtcctgtactttgaggtcagccatctcggacattgaggtgaggaagagggagaaaggcggggctggcggagtgaggtccttggcaccggcagctgtgtttgagtttctgaagctctgtccactcgggtccatcagatggtggcatgctgccttgtagagaccttgtaaaaagtcacagaatctgtgcagtgctcagcacagtgagctgccatgactcctgagctcggtgacttcactgtggaagacagctttccagccagccctctgcatgggatttgtgtggatgccagggaagtgggatgctgtacagagaggtggctctctcacctgcctccctaaccttgcaggtggagagccggcccctgcctggccgcacagtgctccagctgcctggctgcccgacccctgtgtcttttgggctccttgttttggtggcctttcctgtggatggcgagcctggtgagcgcagtcccgagagttgccctctttcttctgcttcccattctctcgaatgcacggtgggtttctgggacatgtggtaggtttgctgtcgtgggtccttgctctggggatcctgggagaagtaaaatgcacgtggccctctatgggaacttagtgtgattctatgagagtctttcagtaaggaaagaggtgaaaggttagctaatgaccggtgctttgtgatccacagcatttgggaggcaaaggtggaaggattcaagtttaaggctcacctggcatacataacagattcctagtcatccagggctacatgaggccccgtgtgtctcagtaaaacagtgcaggggaaggttagtttgtaagtgtaccagatagttcagaaaagggcacgaggcaggatggggccagctggaccctgtctgctcccagctctacctgcatcacctgtgtgggaggagggccggggtgtcagccgacctcagtgtgtgaatgtttgtctccaggttcggagattgtggtgggaaccaccaggcccgagacgctgcccggagatgtggctgtggccgtccacccagatgacccacgatacacggtgagtaactggagtgtgcctgcaccccacaccgcagcctttcttcactgttagtcccttctcctgagacccctcctctctgctctgctgcggctctgtgctttattctttgttttttctattctgcttttccccatgctggggtcaattaagcgtgggcgtggcttccagacccagtgcagctgctgcccagctgagtctctgccacactcacggtagcagtggaggggctgccagggactgtctgctccttggctcccttgctggccttccccttcccaccctggggttctcacggtccctgtctcacacttgtgcctattcctctcccgttagcatttacacaggcggcagcttcgtcaccctttgacgggacagcttctccccctcattacagacaccgctgtggagccacatgtgggcacaggtgtgtggaagggcgaagggagagccccgagagctgctggtgggactgtgtcatggcaggagggcatgaggtggggactaagcgctgcttgaaacccaaggccaagatcagggccggtctcacggcagctgttttccccaggggcagtgaaggtgaccccagctcacagtccagcagatgccgagatggcggcccggcatggcttgaccccactgagcgtcattgcagaggatgggaccagggcacccctctgcggagactggctgcaggtggggcccgccttggtgttaccccgtctcctgcgggcaccctctgccctgcctcgtctcgtctcgtctgaggcctctggtctcgtcacttctccccagggtcttcaccgatttgtggcccgggaaaagattatgtgcgcgctgagggaacggggcctgttccggggcctgcaggagcaccccatggtactgcctgtctgcaggtagccctccactgggggccttccccaggggagggatgatgcatgtgaatgacagcaggatgggctttataccctgggctagagtgtgggttctgggctggggagttctgtttgagttggggtcttgatagtataacccagactggcctggagctcctcttgcctcagcctgtcaagagttaggatgataaagggtgccaccaggccagggtcctgggagattttgtccccagctgttccttagcacgtggggcctaaccctgctacccttgcagccgctccggggatgcagtagaatacctgctgaagagccagtggtttgtccgctgccaggaaatgggggaccaagctgccaaggtactgcctgccccagagtgggaggaggggagtgcctgagactcgtgcagcataggcagggaacctggtacacagtgtgctggcgatagaggcaggtggcctgacagggccagcgtgtgctctagcccagaatttttgttgagatggcttaataggcaaaagctctggctaccaagcctggccacgggagctcagtctccccgcacatgtggtggagggagagagctaaggacctctatgtgtgcatatgcatcatacaggacataaataacttcaaagttatttaattgtgtgtgtgttacggtacccaggtggagatgagagttggttcatctgtgggactagaactcaggccaagcaagctctttgcctgctaagtcatatatctcactggccacccttcggagtttttgagtcagggtctcactgtgcaggcgtggctggacttggctgtgtagaccagactgacctcagactcacggagattacctgttctgactgggattaaaggtgtgtgtgtgggggggggggctttatttccaggctgtggagtcaggggccctggagctctggccctccttccaccagaagacctggcagcactggtttgcccacattgggtaaggggggctctcataaagttggggaggggtgggggaggaccactggtcacattgaggcgtcagctggcatcctctttgacagggactggtgtgtctcccggcagctgtggtggggccatcagattccagcctacctggtggttggagagaagggagaggtcagtgagaagcaactgggcgtggcaggaaagctcagtgcccgggaaggtggcttggggtaggaatccaccagtcccctcccctcctctaggggagcctgctccactaagcccttgctcttttcagggtgacaggaaggaatgctgggcggtcgggcgatcggaggctgaggcccgagaagtagcagcaaaactgaccgggagaccagtggcagagctgaccctggagaggggtgagtgtgtggcagaggctggtcagacctgggaatggagcagacagtgagcccttctttggtaggattagcagcagaggccgaaggctctagctgttccccattccctgttttgtctcccagaccctgatgtcctggacacttggttctcttcggctcttttccctttttctgccctgggttggccccaagaggtgaggtgggctaaaagggagagcatgaaggtgggcacgacactggtgcacagagcctggctaaggcaggcttggaccttaccgctcatcttgtcctagacgccagacctcgctcgtttctaccccctttcacttctggaaactggcagtgacctcctgatgttctgggttggccgcatggtcatgctggggacccagctcacagggcagctccccttcagcaaggtaatgtccccatgcctgtcccccctcctggtccctaagtcctcctgctgaccacaccacgtcctgctgaccacaccacgtatgtctccaggtgcttctgcatcccatggtgcgggacaggcaaggccgtaagatgagcaagtccctggggaatgtgctagacccacgggacatcatcagtgggcaggagctgcaggtaagaacgaaggctcaagctcaaggaatgaggaggttggaggaggtctaggcgagagctgagaacagccctgactttgtcactcatccccaggtgctccaggccaagctgagagatggcaacttggacctgggagagctagccattgcagccgcagcacaggtgagacccatggccctctaacttggctgccagcttcctctgcagcctcaaaggcccgggacacaccgctttccctttggttgcagaaaaaggactttcctcacgggatccccgagtgtgggacagatgccctgagatttgcactatgctcccatgggatcctgggtaagcctcggtgggtggcctggcagagggtacctgtgtggacagccctgctgaggatgagatttccttgttctttccctccagggggcgacctgcacctgtctgtctctgaggtcctgaactaccgccatttctgcaacaagctctggaatgccctgcgctttatcctccgtgccctgggggagaactttgcacctcagccagcagagaaggtaggaggagaggtggcagggaaaggggtccagtcctccaggtccttatgcccttctgcttgcaggtgtctccctcctcccccatggacgcctggattctgagccgcttggccttcgcagcccacgaatgtgagaggggcttcctcagccgggagctttcgcttgtcacccacaccctgtatcatttctggctccacaacctctgtgatgtctacctggtgcgtggtagggcacagcctagcagtttccagagagagctctgtgggtctgcccagttgtcccctccttcactggcctgggctctgtagtgtagctcagcgctgtcacctgcctctcctagagagaaaggaggctggaagagtctaggaaacagggaaagaaggttgcttcagtcactctaggcaggtacatcctaggaggacagtgtggtggggttccacacagttcccatgatagtcacccagcatgcttgtccacctcagttccccagagttctttaggacatgcagtgttagctatagggctgatatcccttcactgtttctcaaccttgttccaggatagaggacgtggtgcattgtagacttgcctaatcttggttctagttccagcacttgagggaaaaaccactgtcttcttctgataagcaaaaaaaaaagacccaatacctttttcctacacagcgccacttcctctccccaacctctgggaatcccttcacagggccctgatcacatgcaaatccagggatagcatggtattggtgatgttcagtagcttagcatataccccatcccaggaaccagtcccctcgggcacagcagtgacagaaagaggcaggatgtggtgtggttggtctccttcctcaggaagcggtgaagccagtgttgttgaaggaaccctgccccccagggcctcctcaggtcctgttctcctgtgccgatgttggtctgcgcctcctggctcccctgatgcccttcctagcagaagaactttggcaaaggctgccccccaggcaaggtggccccgtcgcccccagcatctgtgtagctccctaccccagtgcccacagcctggtgagtcatggatacagggggagccttgtaataaccgaaggttgtgggactattgccacttggccatggggctttttacatgggcttccgactcaggttgtggtgctcgtctggccagcattttacctgctgagccatttctcaggcccattttttttcttcttttgagacaggctgtcccgggactcattatgtagacccacctacctcccaaatgctggggttaaaggcatgtgccaccatgcccagccccactgttttttttatctcactaaattgcagttttcatcatcaagaattaaagtttgagctgggtatgatgatgctcgcagaaggcagaggcaggaggattttgtgagtttgaggccagcctggtacacataccagattctaggactacatagagaccctgtctcaaaagaaaaaaaaaagtctggggctagagagctggctcggcagttagagcatttgttcttgcagaagacctgggttcaacttcccagcacccacagtggtggctcacaattattccacgggagtcagcaggcatgcatgtgcgcttacacataaatgcatgcttacaaagcaaaattgttctgcatttaaatctgctactcactgggctttgtgttttggaagcatttagatttctagcccggttgggattggttggtaacttcggagccagtgcaagcatcggccactggtcctgcaaatccctgggtggcgccctcacatgttgccctgctcctggaagggaagtgttatgcttgcgtagcagcatcaatgctaagtttcccaggagattccttgctgactctgggtttcttcaccaggagtcctggcgccagcccgagctggaacgctgcttctccagagtccaagaggtggtacaggcactgcgggccctccgagccacctaccagatcacaaaagcccgcccccaaggtgaggctgggcctgggcgtcttcagagaaggggcgggggcagcaagggtgagagccgatgcccacactatccctgcctccactagtgctgctccagagcttagacccagaagaccaggacctactccagcccttcctggagcccctgggtaccctgagccactgtggggctgtagggttcctgcccccaggggcagcggctccctcaggctgggccctcgccccactggatgacaccattaagatctacatggagctgcaggtgacctgaagggatttcagagggggaggagtggaagggaaggccttagggtggagaccgaggagcaggctgtgggggtatcagacttctctccttttacgcagggcctggtggacccccagagccagctacctcggctagctgcccgaaggcagaagttacaaaaacagcttgatggcctctcgaaccggacttcatcagaggaggctgcagagaggcagcagagggtaaggctggggaagcctgagtttctggcggggcatgggtcggaaggctggctcacccaccctcacccttctccttgtccagctttctgccctccgcctggaactgtcaaagctggaccaggcagcctcccacctccagcaactgatagaagaggctcccagcgtcagggaactctgagcccacgttccttctcagacgggtctttgaggacaaatctgcctgctgctgataagatggagaccccagaggtgactgtccaccttcattttgtaaaaggaagcaaaccagaagtccctgtgacgcaagaatgagaagatggagataaaatgataaaatcctacacccacttgcttgtgagctttcatcaccctctgcctctctataggaggagggggctggctgggaacctcaggtgacagtggttccagcagttccccagacttaagagacggctctagtgaccctggaagtacctttgttccttggccctgtgcctggaggttgatatttttcctgggtatgaggggctataagaggctctggggaccacagatatactctgtgtctgagttacacaatcccagatgcagacaggtacctgcacccaaacacctcagtgaaattcagcgcccgcccaggccttctgagtggagttagctcaggatggctatttgtgctgagccttttgaggggcaggtctcccatcattcttgttatcttactaagcgccaactcaaaaagctgggcgttggtggtgcacacctttaatcccagcactcaggaggcagaggcaggcggatctctgagttcgagaccagcctggtctacaagagagctagttccaggacaggctccaaaacaatacagagaaaccctatcaaaaacaaaaaaaaaaaaaaaaaaaaaatctttttttcttcattgggacacagacatgccagagaatggaagtaacttggattaacagggattcaacctagctgacccaacaccccacctcagccgcagctttttgctgctgggcagaagtgcagggctcggctgccatcctgatctactccgttgctgccatgtgtccacacgcttaccaaggaaggaagcaggcggatcccccccacctccccagttcagtgggtgagaatccgtttaaaagtcaacaaattcaagggagaaacgggaactgaagtgtgtgggatatcaaatggagttaagcaaagacttctgggaggcgcaagaatagccaagtgggtggctgggaaagaggtcagagaaacactgagatggggcatataaagagaaacccaaaggaggtcaagagagcagaggggtgtggtggggagctgtgctgcagccagctgacaactggaatggtttgtggctgccgcgtgggcccagttacagagcatgttgagaggttagcacggtgggggctctttgaagggctggacttccctttcctagaaggcatttaacacttcccgcttgcatcctggtgaatacaatatcacatagccaagctagctgcagagggaggcagggaggtgttcatcagaagccaggctcccagctaaagtttacacggctctagcaaaggagaataaatggccatgggttcttcgccagtgctccgaaacttcacaagactactctcccaccgtcaggcatccctggtcctccaggtttacctctggtgcccacctcctgattggtccccagatgcccaggccggagacctttttggagagaactggttacccaagctccacacctgacactagtgccactgaaacatctgccagcaaggtttcagacatgcggggccggcatccagaccagagcatttgcctgccactctgcccactgaccaggagaaactgacttcctcatgaggccaggggcttaagatagaaagcagtaatccactgagtgggtcctggaggggcagttatccaactgggagggaagtagtcccagtcccactgatagaagagtcaacagcacaaccaagggccctgaagggacacgctggacctcgttacagtcgagatacatcctccaacctccggaggaccagagaccaggccagaggctggccaagggatggtatctgaggtgggggaggcgtggtgaacaggacagtcaggctggaagctgtgttcccctctagccactgtaaaccggaacctacaaagagaacgccggcggtgggtgctcaaggagcccgggcactaacccctcattctcccgaccctgcaggagtgagtggtccctgctacactaactgtgcccctgttgctcctgagggctgccctgaagaaagcacctcctttattgaccacccctagcagaaactgaagtgcttagcaaatctgcaacagactttcagacttcacagcaaggaactggcccatctcactctcgtccatgccaggatctacttttactgtttactgatatttcctactagaagccgtttccaaaaaagtcctccagttcatattgaggtcagctctatgcacagaaaaataccaggtgttcctttcttagacccacgatcacagagacccaccccagtaagggtagtctacgggatgctctgccgataacggccacctgtagactagagacactggaacatcttccagatcttgtctcctgctccagagcatccttttgagattttactggcctggtatgagtacctgtaccctctcctttctcagtaggaccaaaacagaaaggggggagcttgttcagattagtgaatcatctcccctatataaaattcaccacttgttttttcctttcctttagtttttcaagacagggtttctctgtggctttggagcctgtcctggcactagctcttgtagtccaggctggtctcgaactcacagagatccgcctgcctctgcctccagagtgctgggattaaaggtgtgtgccaccaacgcctggcaaaagtaaaacatttcatttaactttctttccccctcaaatttataatctgtaagcaagctcagcacttggggtgaaccatttaccacatgtacctgtgatctagagaaacagaaaaatgagcctggagatgcaaggtggaaagagccggtggcaccctcaactccagcaggctgagctcagcagcttggccagaatctgaccctggggggctgcagacccagtgctgggatggaacccagggccttgtgcaagtctaagcaagccttcaacccttgaaccccacccacagccctacagcctgctcttgctctgtttcctccagcactccactctcccatagcctttagatcctcaaagctcagtgtcttcagcaaggccaggcgagagtaaccccccccacacacacacacacacgagataggggtggggtcttgcctggagtggggagatcctggtttagaggatagggtatgggtggggaggtcacttgttctattagctcagcggtagccatgtgggttctgaacaaacaacaaaagcccctcagggttccagcatccagcaaaaccttcctacccccacccccacggaactgctcacctgtggctgtctccacctgaatttcagggacttccaactcaaagtgagtttgccatcactttcctctacctcagaaaatttcaagactgctttgaattttcctaagctacaacagcttaggaagcagtagaggcaggcagaagagatggctcagctcttcagagaacccagagttcattgcctgtatccccagctgaagcctctttccaggcaggggcgcacagattaaaaagttgagcaagtcttccctgcccccccccccacagcccactcccaggtccctacacttagctcaagggcctgagagccaggcagatgagaaagctaaggacctgccccatggccctttctcaggtgtgctgagtggggagcatgtcctctccaacccttcctccccagggcctaggagtctggtttgttccatctctgcttaggagtggtttgcttaacccgccccccggctctaagagagagatctcagtgtagccacggagttcaaagcggccgggcgaatccttactcctggaggaggtgggactgactagggctcccatcagctggtcttggtcagggtgtccccgtgctcagaagggacccttggagtgctagatgaatgtgctacttccgagtcctggtgattttcaggcgggtatatcctaccttgaagttttctcaaatcctggacaaggtgcccgataaaatgttatcggggtgctgctggccatacatgggttgctgagtgtgccccctggagaactgaacatcagagaaagacagaagaccaggcagcagaagcaggaaactaacaggaagctggcttgggaattgtagagggtccctgggtcctccccctttcacctattggccctatttagaaaccccatctccatgccttcctggcatttctccttgaaatatcttctgggaataagaaacccccattccacccagcagtggtggcccaggactttaatcccagcacttgggaggcagaggcaggcggatctctgtgaattcgaggccagcctggtctacagagtgagttctaggagatcccccggctgttacacagagaaatgctgtctcgaaaaaccaaagtgttggggggggggaagcccccatctcagtgcttttattttccttgtctacatatgtccctccagctccccctcacagctatggtgaaccccaaggcattatctccactctactattctaggaaagaaagctggaaaggacacctggtgaccacaagtcttgagctctaggagctgggtggaagaattgacgactgtccactcctcaggcctgagcccccagctggtctggagtatgtacacctgacccatagggaccacctccctactggtgcagtccaagggcaggtcgcagaacactgggggccactggggacctgtgggttagctcttcttgatgctacaagttccaggacagttagaaagcaaataggcaaggcaaaatttctactcctgtttccttcccttccatgcttcctcatcttcagagatgttctctctggagtaccctgcacctccacaggagccagctcttagatggggtgatggtggcatgggcggggactggggaggatagtagcagtcatctcaacactcccaaggggtcgatcaggtctaagctacaagatttagtcagtgagaagccaagataatttatcttgtttgtttttgaggcagagttccactttgtagaccagactggacttgaactcagagatctaactgcctcctgagtgctgggatgaaaggcgtgagctgctaagcccatctcaagataatcttgagggaggaagtcagtaaaaacaggaagaagactctggatctcctgagaagatttgaaccattaaggctgggtctggcatccgtctgtcccaaatgtgccaccaacagcatgacaggttctgtgtgtggaaagtccctccagagcttacccacagtgttctcagaggatacaggcaatgtcaccatccccatcttgtggacgaatagaagcttggagaggaccgacccttctagggtgcctgtgatcccaggtccgggtaacaggcgtcacacactcctctaaggctgccccccctcccccagcactgggacttgctggctgcttctcagctgtgctcttcacttccctctcagctccctctaccctgccttccccactgaccagtcgtgcaggccacacaggaccctgagatgttccgtccacattcctaggggttcctgggcctacagccccaaacttaggacgaagggctgcaattcaaaccctgcttaagctaaggcctctgcatggtgcctggtttcctcgatgctattggacttcaggagagcaagccctccaagcctgggttttctcttgtaaaaggagacgatgtggcagagtgctcagggttgccacggccatcacacggaaaagctggggacaaagaggaccacaacaggataggcattctgtgtgtgtgtgtgtgtgtgtgtgtgtgtgtgtgtgtgtgtgtccatctgtgtgtatgtgtctgtctgtctgtctgtctgttcatctgtctgtctgtaagttacctcactcttcatactccaggcctctgtggtgtacagggagagtcagtcagttagagagcctggcatgcagctccttgtcctgtctgccctgtgctcacagaccccactggacacaccaagccagtcattagatcccacgtgtttattagcactcagcagggcaagagcctgctccatcaaggcatgctcactcccagtgcccactcccggaagcctgtgctcgaggcccacacaggctcagccgccctcaggttctacaggttagatggtgtggtgaccctttgtgatggagggtcatgttggcccccggcgggaggcggaggaggaggcagatctggggaagcaaaagtgagtagaggacaaggtgttgagggcaccccactccccactccccgctcagctcagccagcccgcgcacagacccccagggactcagagacgcgcacagaaccgatgtcccctttctcggaaataccttttggagcaagtccagaaagctggagtcctgggagaccttggcctggaaaacttctgtcagctttactttcaaagtcacctttggccctgggaacccagaaatgtgactcaagaccctgcagtcagggtggtgttacccaccaaggaggcatgtcccacatccccccagactccagtgctattccagatcaggctccgtgccaaggaatcccctcccctctctcgcctccatgcccaccctccaagcctcacctgttgcttgtgagctgtagaggagggccaggaggaggaggaggggcatcggagaccccattgtggctaccttacttctctgatggcagaagatatgtcgaaatggcctctcttaactccagggcccttgctgctggtgttggggcatcaagagagatggcaagtggattctcccaaagtggttcccatgactctggagagggccactcactggctcctgggtaatgtagagggtagctccctccccccattgtttgcttcagatctctgaagagagaggggtgggaacaagagggggccttcctgcaggtgtcaggccccacctaaacctgggcccctccgtggttcttgagggattaatgattaactgttcttagctgtcatcattcctgccagagaagggctctggaatgtaggccacaaagggagggggtgggtgaggcctcacctgccccagtcaagaggcatctttaatgtcccagcctcagtggctttccaggtgggaaatctgggccctggggaccttccacctttgagattttgcttttattttatgccgatgaatgttttgcctgcatgtgtgcagtgctctcagaggccagaagagggtgtcagatcctcctgcaaccagagttacagacggttgtgagctaccatatgggtgctgggaatcaagggctcttaacctctgagccacctctccagcccctctgccagactttttatgtgggtgacagacatggaacctaagccctcatgcttgcctggcaaacacttttaccaatgagctcaataataactgttaattggtgccgatgtgtggctggtgctaatcaccactgaagtctggtgatatgggcacgctcttcacagaggttgctgagccatgggtgagaggattctgagagcatcaattgtgtgcattcgtgaagcatcaatcgtgctggacaagcagttctattgctatgagggcctgggttgtcacaggaagcaatactccacagcaagagccaagagctgggcagctggcccccaggccccctgattaggacatcctatccacttaaaaaaagatttattatgtatacagtattcaggtgtgttgcacaccagaagagggcaccaaaatctcactacagatggttgtgagccaccatgaggttactggaaattgaactcaggacctctggaagagcagcaagggctcttaacctccgagccatttctccagtcctgacatcctatccatttttcatctcacagacttgccagttctgagggagatgagtttggggtgcagtggtgacctcttacactgccaccatcaggctgccagccagcaaggctcatgaggggtagggctgagctggctaagagccatttgccctctggaaaaagcaaggtggcattgctgacctcatcagttctcacaggtgagatgtttaatgtacacagagatgctgggccaccctgagtcaccaggctccggtgactggctcctctgtgtcctactcaaagtcacctctttgaccgtaagatgccatcttgagccaggcatggtagtttcttcctgtaacctcagcaccgaagcagcagaggcaggacaaccacgcacgaattggaggtgggtctggccttcatagtgagttccaggtcaaccaagacaagataccaagatcctagatcaaaaaaaaacaaaaaaaaaaaccaaaaaaaaaaaaaaaacaatttaatagccaggtatggtagtgcatgcctgtaatcccagcacatggaaagtggaggaggaaggatcatgagttcaaggtcattctcagctacatagcaaaatcaagtccagtttggagttcaggacaccttgtctcaaagcaaaacacacacacaggcacacacacacacacacacacacacacacacacacacacacacacagagagagagagagagagagagagagagagagagagagagagagagagagaatattaagccaagtaaaacaaaaaaattaaaaaaaaactaaattgagaagatagggctagggaggttgagaacactggctgctctcccaaaggacgaggggtcagttcccagcacccacatgataactcacagctgtctgtaaatccagttcagggctccaactgtctattgttactcccatgggcactgtgcaaaagtgaaccacatagacacacatcaggcaaaacacccatacacacataataaagcaaacttaaaagaatggcacctagtaaattgtttttaaaaagaagcaaccaaaacaaacaaacaaacaaaccccaaaactgagaggcaccgggcagtggtggcccatgcctttaatcccagcactcaggaggcagaggcaagcagatctctgagtttcaggccagcctggtctacagagcgagttccaggacacctagagttgtaacgtagagaaaccctgtcttgaaaaaccaaactaaaaaacaaacaaacaaaacaaaacaaaaataccccaagaggctcttctctagacacctgggtcttctgtgaattgtggccaaaggtgggaggaggggatttgttcacaagcactggctgaaagcttattctaaaacaggaatccttgcccctggcaccattgacacatcaggctggtgattcatcaatctggaaggtgttccaagccataccaggggccaatagcatctctagccacctccttctagataccagcagcctgcatctcgcacggatggctcctagaattgcagcatctctctgggggaggcaaaattggcccttctcacagtgtattggggttggaaccttagaggaagaatgggttagaagaaaggagtctggatggagcctcagggaaaggtctgtctctctctgttttcagtttccacaccctggaggctgcacttttgtttcacaccctgccccattctgagccatcagtctcaggcacaactacagaggctcattaatctcccattaattgagctaatgggcagttggcttcttctgccctttcctgatcgagccctgcctaagggtgtagcaccagtcataccagaccactattcctcatgagccccagaggcccaactccaggcctcctacctggagacctcaggtcactctaccccctctgctgcctacctccctcagggagcaacagccctgcttccaactcaccaggagactctcagtttttggggtgctggactctgagcccacagccttgtgcatgtcaggcaagtgctctccactgagccacattcctgacgctggtaaaggaccactgactggctgtctcctgcatgttgggcattgtctggggctatggatgtgatggggacaaagacattgcctcggggtgctcacaagtaaactaggtttagggaagtgtaggggctcctctctctaagagccccactggagctggtctctaagctgatgcttgctttagatgggggatgagtgaagtctcaggtacggggttaaaggggatatgcaggtgattctctcttgagccccacaactgagacctttcaagggggaaaatgagggggtggttggaacttgtagcaataggaggggcacatttctaagcagggatagatgcagccttgaggcagaggcagccgctgggctgggatggcaggggaggggtaggcaggacagatgtccccaaaggctagactaatgatgtcagtcccagggttccccgcctgtcttgtccctgtccctgtctcagctattacctgacacatctgaaagcagctgtgagtgtgcagtggaccacgggagggctgcccccttctctgctctttcacctggtcttggggacactccacccagggcagaaagtgtggccatgtgtgagtaaggggtgtggagctggatgacgacagagaaacaggagggtgagtatgtgcctcctcccagagcctggacctgtcctgtgccccgtccaaaccttctagaacatgagcattggctcagagcctgcaggccaccccatacaagccattaactctttctgcagaggctgggtaagaaagcggcaggctggctaccccacccaggtcctttccatgtcctcagatcccagccctttggtggaacccagggacccagctgtatgacacagctgcggtctcccattatcagggcgcccccatgggtggggcagctccatttgcttaaggcttagctcagagtagcctcagcccccatgacgtcaaacctgaccccttataagatacagggcccccagcccatggtctctcagcagcctcccagctctgacatggctcagctgaccagtggcctctgttcttcttttggcttcatctgctgcctcttcttcctcccagcttcttgggaggcaggtaagatgcccagagaggtaaaggggacaccgctatatggggaggggtagaaatcacaaagggtcttatttctcggaattgacggggctggatgcactcacggaaatgaatgaaggccagtggtgtggatggccgtgaagtagcctagcgtgtccaggccatgcacgagagggatctaatcccggtgtttcttttgggacgtctgaggggctacacctgctcagagcttcaagctgtgtaaagacaccgtgtgggcgttagttctaggtgagcgagggggcacacactgggcactcacagcatgtaaggaacccattgatgctcacagtactccatctcccactgtctccttaatcccccagagggacaataatatccatcttacccttataagccgtgcggagggcaagctttgtggccaagagcacagggtggtccggaaggttctgtacagacccggctttttaacttgatccagccatgtagcttacctgtcaatggtacagcaggaaggatgctggcagcctatgccagtggctggggtacaacctactctgcaccaggcgtggtttgaccctcacgacagctcagtgaggttctgtccccatctgataggtggaacacatcccaagacttggataagaaaagtttgcctctcataagagatgttaggggaggaggtggcaatgctaggttggttcactagttaaaagacgatgctgggacgggggtagagatgccgaatgcaggggcactttgaggcagtctgggcatttacaggagggtctttatcatgtgaacaaaagtgcagagtttccacatctctagcagatgtgaaccccccccaaaccagagatcttggggtggctgcttctgggacacagtgagcagcatcttcttccaataggcccaactaggggtgactctaggctggggctcctgccctgagctcagggtcttgctggggtcccacaggatggcaggggtgggagctgagactttcagcacctctaacagacctctgtcggcatttgagctgctgaccctgctcccacccagagggtcctccggcagagcaccggagccagcctcagtttccctacctgcttctcttcccctgtatcagtcgaggtccacctggtgtcaagccgctgcacaagcggaacaaaccagtagggggcgcagggaagcacgctcaccctagtcacctggagatttgcctcagggagcgagcttgcaggttgcgagcttgcggggcaggatgcagggagagactggagggtatgcaggcacatctgagtgagacggtgacaagccggggagtgggggcacaggctggaccagggtggggcacacgacggtgtacaacggagagagaaatcaggagagagaagagaccactcagggtgtgtgaagcccctgtactgttctggcccagcatctatccacgggacctgttggttcccagactcaggcagggcacagaactccagagcctgtcagaggaagtccaagagattcaggggcagcacccagattaaatcacaacagggaacttcaggcaggggaatgtgggaacggggagggggctgggggtgcagctacaatggtacagttcttgccaagtatgctccaagccctgagtaaggtcccagcactgtggtggtgcacagctggaatcctaacactagggaggtagatgcaggaagatcaaaaattcaaggtcatcctggtttacacggtccagccgtgagaacttgcctccaaataagtaaatatttttttaaaaattgacacctaccccggacttgatagccagccatcttcctttcacacattcattctgggaagtcacttaacacagaagatatcactcctgggtcttccagcctttggtttttgtttttttcaagccagagtttttcatcagtagctatggaaccagtcctggaactggctctatagaccaggctgacctggaactcacagatctgcctgcctttgcctcctgagtgctgggattaaaggcgtgagccaccaacgcccggtggggactaagcatttaactcctttgggggcagtctggctctacgctgtggtgcctggaaaatggcgctcccaatcactgagcagtgaggggagcaacagtgaggcctcctccttacacctgtaaactcagttccctcctgggacttgggcgtctctattctcctcatgcccttgccctctcttcccatgcttctctctaggaccgaattctgagcttccaatctcttggccgggtgtgtgtgtgtgtgtgtgtgtgtgtgtgtgtgtgtgtgtgtctcagtttcccatggctggaaatgggtccagatcccgggtaccaccctgagccaacggcgttgacgatctcagctgtgtctctttactctgaggtaatctctggtctcctgctcttgtgtcagaatcagagacacatctctccctcgtttcttcattgaattaaggcgcgtccctgatagaggtgtgtttcccttcacaccctgtccctaaacagaacccctcccagaatccagcggccttgctctccactgtcaggatctgccaggagaaactgttttctatcaccctcatctattcccagacatgtgcacaaagaggggggcccaatgtgggtggactccaggggctagactgcctccctccactcagaccaaagttcattgccagaatggaagtttccgttttcctccccagtcctcttcccccttatcctcctctcacaacctctccacctggacagttctgccaggagtctgcctcagtttctcacattgtcacacttggaatggaactgggatattacaggaacacaaagattctgagatggattcaatttcctctcagctcttccacgcaaagggagttctaggaaggtgtgttaggacgtggatattgacaggcacgcaagcaagtgaaataattggaggcgttgataacgatgtttttgactgagactgtgtcagcccatgggaagaccaccagagtctaagcaatggccatgggtatgagggagagaccatatcaaccaacgagagacaactagatctagaaccaagagaggtgccagatctgagagtgaaattcaggaatggatttggggaaggaaaggctacatttttgctcaaggtacagtttgagcaaaagttcagcagctagaggtgagaatggggttaaacagtgtggtgtcctaaagaaccttcccggggaggcagctacacatcccaaagatgcctaacagaggcaggaaagattttagaaagtttcttatctgtctgtctctccacaggtgctgctacattccaagaaccccannnnnnnnnnnnnnnnnnnngctgaacctccaacatctgaccatccactcatcctcactccaggccttactcacaggtctccttctgcccatgctgatcgggacccaggacaacaacctccaggcctccctaagtctacaacaacccagaagcccaaaaaaccgtgcagcaccagacgctttgccaaaccagttcataaacccatagacaactccaaagccacagataaccaaaacaccactgttcatcatgaaatgactccccctatggaaaagaatgccagcagccaaagaaaagaccggaatggacgctcagccaatgaccccacaaaagcatcagagagaagccattcaacctcagcacccaggagaaggacaacttgtaagtccacaacaagcaaaaccagagtaacgaggaactcgggtacaccagtgaggcatacggataccagcactaggcgaaggaccacctcacacaaatccacaactccttcccatgactcagcgctcagtagaaaaaccacaccttcctcaggaaactcatcagaagctccaaggacctcatacaggactccaaggaccccggcaaccacaggagctgaagatcacaggactccctttgccacagacaagcctgcccaaatgactacagaacacaccaaagagaccacatcagccagtgacaagaccataggaacccaagtgactctggcagatcatgagggagagaatatatcaaccaatgagaggaccaccaggtcccaagcaacagccactcagtctgaaggagagcctccatcagccagtgagaggaccaccaggtcccaagcaacatcaccaacagccactcagtctgaaggagcgccttcatcagccagtgagaggaccaccaggtcccaagcaacagccactcagtctgaaggagcgccttcatcagccagtgagaggaccaccaggtcccaagcaacagccactcagtctgaaggagcgccttcatcagccagtgagaggaccaccaggtcccaagcaacagccactcagtctgaaggagcgccttcatcagccagtgagaggaccaccaggtcccaagcaacagccactcagtctgaaagagagcctccatcagtcagtgagaggaccacgggagcccaagtgacgcctatagaacatgataccacaccagctgatgtaaagacaacacaagtctcagcaaagtctacagaacacacagaagaggccacaccaatcacccaggaagccacacaagtctcagaaagtcccacactattctggaggaaaaccacaccggccactaagactgtaacagctataggaaacccagggaaaacagtagcagtcttcacaaccaccagacctccagtcagggccacagaggacaagtctactgctctctctcctcatttccataaaactgagaccacacacggggaactccttagccctgtgacaactagaacagacctgggattcatcacttcaggagctcaccacccccagcagaacagccacagctcacctggaagcctccacgctgctggggccagcagggagagcaattcattccctgcatgggccatagttactgtgaccctcttggcggtgattgtcctactgatttgcattggcctgatcgttttggtaagggcagtggggcgggtggggatgggggtgacagagacgaggagagatgacgggtcagaggtagagagttagagctggggtggaatgtgagaacagtagaaaaccagcaaatctggaaaaccacaggaacggtcggaagagagggctgtggccgaaatggaagggggtatgtgagagagaatgtgcttgggcgtgaggtttgggatataaggaccagatggatagggcaggggccgggttgtgggtggaatatgggactctagtggatccaagtctgggatatggactaaggacaggcaaaaggttcaggaaaagagagaaaagccccaagggtggttgatgagatcaagggtggtgatcgtattttctgtcatctcaggtcgcctgcacatcaagaacacgccgcgtactggcccagaactctgaggattccgaccccgaggacagagggggccgcaattcctaccccgtctacctgatggagcagcagaacctgaaaccaaaccagatcccttcccctccgtgaccttgagaccttcgtctccaactcttccaggcttcgcccctttcctggaagatgaattcgacttaggactccaacttcctggacttagaaagggcagcaaaaattggcagataacagctgcaaccctcgtcggccacgttttcttaactgactagttgaggagccaggtggtaagggtggcagtgtgcatttggaggaaagggaagaaagagtgaataacgcaagcactgtcagcagaactggtgctgtgagaacaaggccaaggcgtttaatggacagcgggggcgggaccaggacaggactctgagttctgagaggcgtggccacatgaggcatgagcacctcagaagacaacaccccagagtgaaggagaaccctgggaggcacgaggaatggggggcaacggctcgggttttaaaactaatttatagtaattctgtccacccccacttaaggtgcacactcttctgaactcccagaatactagatcttatttttttaattaaaaaaggactcgagaataaagaaagatcgaagtgttttctttcccatcctctccattgcttggagagagagagagagagagagagagagagagagagagagagagagagagaggaaaggaaggaaggaaggaaggaaggaaggaaggaacccaaccctgcaaagaccacaaaactcctcctccccgcggttcttccccgctccttgtgagtcccttggttatcctggatgtctgcggtggattttctgtttgtgggtggctacacacagaggggtttgtgcttgcctgcagtcttacccacccgcctcgccccaaccttccctggtgatgcatccactccgcaattggattcccgcaccagtcaccaaaagttggcgctggcttcctcttgcagagtcagcatcttctcccgcagcgcgaccctctcctcagtctcccaccgcactctgactttgctttggggatcttctttccaacttatcccatccttttacctggtactgacggggccgggcgcagtagaaagaggatagcgccctctgctggacttccgtaataaagccgaacgcatttgtaaggttcagactgcagactccgtggactctcaggggaatagaactgacaccctggttcagtgaacttatgggtgaccctgggcaggagaggttgtagggcaggacgggagttctttgatgggccagagagaggagacagaatttctattgtttctaaaatggccatttctgggcttaggtaaaagctcagttcaattcattgtgtatttatctgcacggtgacaaagggagaggggtgggaattcagtattgataagaaaggttttatttattgattgatttatttttaatttttagattctgtgtgtgtgtgtgtgtgtgtgtgtgtgtgtgtgtgtgtgtgtgtgtgtgtgtgtctgggcccatgtgtagttacccttagaggccagaagagggcagaagattctcctggccatggagttattaacaggaggttgtgaactacccagtacgggtgttgagaaccaaactcaggcctctgtgagtgcagtgcttgctcttagctgttgagccctctctccagccccagaagcagcatttctaaacatccaacatctatagtttgttgatataaagacatatatgacaaggttcctgcctgagacagaaatgcaggaacactaaaaaccataagtcccacagaacctgcccatcacctgcatagccttgacatctgccgatcctggagaaaggtggctgacaggcactcagtgtaccacaggccttccagccagactccaaccctaaccaggcagcagggtcacaggtcagtattgccacttttcatttccacatttctaggtattaggaagctcctccaaggtcagaatcccggccctgacatggatggtcctgaactatccatgctgcttctggatggatggtctctctagatgtcccatggaggggacaggctctgctgggggcagttggcagctgggcttcagaaaaaggatacctgggggggtgcagaaggaccccagactaagctccttgttgaagcctatcacaggcaggatctccaggaagaagagaagggtgtgtggtttctggttgtctgggcagatgtgacttaacagagctgtccccacacagtgagtgacccagggctcctgggatgctgaacagctgagccccagtctctgagctggattcctcccatctagatgctaataataataattatttcccctagagccttagcatccagctggtcacagttcccctggggctcaagtctctcctcactaattattactctgaaaccgcagggaagtcctttaatgagctccaggttggacccacaggaagtgtaattacgtaatgagcaggtctggggggaatacccccttttctgcacgcctgtgtccttgtgcctcctaagggtcactgcaggagctttgagtgcctaagacacagagggcagaggccagagcctaggctccaattcatcggttggcagtccccccttctcctgagctctgcctggtgggtggacttggatttcttctgtggaaacagaggagctactgtagttccggattcccttctcccatcgtgagatctactaggtcagtttctgccctactcacgggtggggtagacggtttctctcccacagtcaagccaaatgcacaaaaactactcatcttcagtgctgagcatccacagatcctggccacccctccttcccttgagctctgaaacgacccaagccccaccctcgattaccttgcttgctgtcacagtatccttacctcccacaatctccataataacataccacgcctccaccactctctctgagaccacaacggcttccatttcaacctcccaggttgtcatattgtccaccacaatgtctgcaccaatgagggcctcaggcacacttcctgaagccaccatagggtccctcaccatttctgagcctgtcaattcctcttctgcaggttctgtgtccaccttggcttccagctcaggctctgcgaccacttccactagagaccctagacagtggcagtgtcttccacagaaatcagaacacctgacatgaccaccactgtttccatgatcctggaaggggccccacgcaacaatctcaacagctccgaatgcctctcacctgggcatatctctcatgttctcaggctagacagcaggcacctttacccactgagccatcttgctggttctaggatgaagtttcaataaatttacaatggaacagggctgtgctttagggggtcaatggcaactctagactgtgagacacagttccttcaatattgtacagtatagcatagagctatctttcgttccctgcctcgacttccttcagtgatgggctgtaactgggaactgtaaacatcataaaccctttcctgtctaggttgcttttggtcagggtgttttatcaaagcaacagaatgaaactgcaacactctataatggcccaggggtcctcactgaaaatatctggaaggaaaagagatgggccagcaaatcttctacagggagttgttgaattgaccggaaagtaagcagtgctaaaattaaaaaacaagagaagccaggggctggagagatggctccgtggttaagagcaccggagtccaattcccagcacccacgtggtgcctcacaaccacctgcaatgagatctggtgccctcttctggcacaaagatgtcacatagatagagcaatcatacataaaataaataaacctttaaaaaaaaaacccacaaaaaacaatgagccaaccacggtggtgcacacctataaagccatcactcgggaggctgcagccagatcacaagagtttgtgggcagcctgggctatgtgacatgaccctagataagccaaaaacacctcgcttgacataggaggaaactgaagaaccaggaagtaagaagaagccacggaatttgagttcaaggtatttctaccttagtgggaccagtccaggtggcctgtccagtagtccctcatttaaatcaggaaccctccctgagaacacaaagtaaaacgaaactcatctttcctcgaaggaaatacaacccacggcacagggaagggaaaggaatgtacaccttgagaaaccaacaggaaacacaacagtatctaaagtgacctccagctggggtcatacacctgaaaagacctcagtcttattttttttttttcaagacagagtttctctgtgtagctctgtagaccaggctggcctcgaactcacagagatccacctgtctcctgtctcctgcctcctgcctcctgcctcctgcctcctgccttccaagtgcagggactaaaggtgtgtgccaccacctcccggctaaagacctctgttttataacccaacgtaaagaatcttcaaacacccatgcctgtgtatgcttggggaaattatgtgccttctctgagaaaggtcattgcttcagcttggccttcagataacatctacaggtaatgctgtaagagaaatccacacggcatcagaaatcttcaatgcaaacgaacacaaaataaagcatgtccaagtccacaaagactttcgatgttagaaatgttaaatgtcggccataaagtaaatgggtttaaaatgtgtgtggtggcttcagagctacccacaaacatccctggccatcttttgtttggggtttttttgtttgtttttgagaggtgggttagatgtgtactgagacagggtttcatgtaacctgggttggctctgaacttgctatgtagtggaggctggttttgaagcctgaattcttctgcctctgcctcccgagtcctggtatttcccaggcatgtgttatcacacccagtaaggttgctcaagttgtattcctggcttcccttgcatctccatgtagtgtggtggcgtagagctctgcgtgacatgcagaagactcagggttctaccccaggcaccactcagacacaaacaggcaagaaagttgccaggtgtgatggtgctcaccacacacagggacaataaggcaacagggggtggggggtgaggttgggggtggggacctgggctacgtaccaagcccctgtctcaggaagcaaacaaactcacagatctcaaaagacagaatgaacgtacttatggcattcaggtgtgaccaaggagatgagtcatgaaaattatcgaattgttccaagttccctgttgtgagcacaggttagttacttttagattctgatcagtactcacggcacagtttagactctgaatttgcatctgagatccttccctccggctaagtctgcattgggctggcaagccatcaatttttcaactgcagagttgcaggaagcctagaacctcacttgtcaccgaaggttcttagtctcaggagaggcccatcacagccacaatggagagccgcttctgggcctttcccagccagccacatcccttcctgtctcagaatcctccagttaactgccagcttcctcacagtagggcttattcacctgccagcagactgtcaggagcatgtgctctcgaatgaagcacctccactctcccaggagggtgaaaggcagtcaagctgacagaccagtagcacacggtgcccctcccacatgctccccaaaccctctgctcatttggatccggatctacccagtcacactcacttagctgaccatgtgcatgtactctctgctggcagcgtccaagcgtctagaccaaactccacactcctatctagaactcagactgtctaagtctccttccgttagacttggtcttccaaggcagggcctgtgcctcgccctgctgaatactgctgagagaagcctttcataagaagaaaagcatattggagggaggggcacacccacggttaagcttcaagaagtgggccctagggggaggtaattggcattttttggggggggggtcaatacctttctcatgatgggggtgggctttcttgctctggagagagcagggtgttatcagagaacctagtatgttcctacaaaccctttcttcatatctggccaagtgatctgttccactcacaccggcttctgccatgacctgatccaccatggcatcgaccagagtgttgtaacagagcctttacctcagacgagcagtggggctgctcaatcttggactttgcacctcctaaagtatgagcaaaatcaaccttttttttttttaataaagtatttagcttcagccattgtcctgactgactgtaattgccaacttgacagcctagcatcatctgagagatgtctggatggagaaattgcctagaatacactgacctgtgggcatgtctgtaggaaaccatcttgattattaattggtgcgggagggtccggcccactgtgggcaacagcatccctaggcaggtgagccttccctgtataagagctagctgagcgtgggctggcaagggagccagagagcgagacaggagggcagcctttctccacggcttctgcttcaagctcctcactgagtccctactctgactttctccagtggtagactacgtcctggaagtgtgagccaaataaataaatctcctccccaggttgcttttggtcagagtgcttttgtcaaagcaacagaaaccaaactaggacaggcactatgttacagcagaaaatggacaaagagaggaccccaaagaagggttcactaacaatggctgtccacacctgcaatccaggagcccagctccctgctgactgctccctttggagtcaatagggtcctacccttcagctgagattcttggggcttcctctctgctcaagccaaaccacagaatttcttgaccaggaaacaaaaccttgagctagaacgggtttctgaccccatccgtgccacaggggtgggtcccttctctctgacactcttgagctcctttttctcttcctgtttcaacccagcccagtgtgatggtgtcactcttttgtgccatccctgtgacccttgggccgctgccttcccaggctcagtactgtttccttaggtgctcatgcttggctgtctgtcaggataggtgcccagcctctccctggcccacaggaatctataaaggtggcaggagcccttcagtgatgagaaagaggagacaacctggcgccgaggaaacttaacagctcaggcatccagccaccctctccccaggaacaaagcccttagaagaacaggactattgggagctcatcttcatctcttccttcctcaagagctttctagaacttgggccacatttgggacccaggtgtctttgccggccacagggaggcagatgacgatgcagaagggaagcaaattctggtgctggctgcttatgcagctgctgcttttagggcatggtgagtggttttgtctagatgtggatggcctgggagcctctgaggaggtgggagaggctgtgacagcctctggttctccccaggagagagacccatcacttcatctcttctggggcatggtggtcaccacccagggcccagtggctacactgtgtgctctggtctcacactgcctgtgaaagggtgataacctgtgtggtgtgcgtcagtgtttaaatagtaagaagagttaactgttttttttaaatgtttatttatgtaatgtgtgctggtgttttgcctggatatattctgtatgagggtatctgaacccctggaattggagtgatagacagccgtgagctgccgtgtgggcacagggaactgaacctgggtcctcaggaagagcaaacagccatctctctagctgagttgactattttttaatgtcattttttcacattcttttttttttttttttttttcgagacggtttctctgtagctttggagcctatcctggcactcactctgtagactagactgctctcgaactcacagatatctgtctgcctctgcctctcgagtgctgggattaaaggtgtgcaccaccacccccaccccaacccaccgccagtttttcatattcttgaaaatgaatttccctcctgtctgtaattctgattccacatcagcctaagtcatcctcagagcaagaacagattccaaacaccaagctggggccggtggccaggcctgtaattccagctactggtggggctggggtgggaagatggcaagacttatctgggctgtggagcacattcaacagcaggctggtcaaagtggtgagaacctatcttgaaataacatagcacagaataaagaagaaagctcctgggtagagtgcttgtataggcatatgggaggccctaagtttgaaactcagcacacacaccacacacacacacacacacacacacatatgcacataccacacacacacacacacacacacacacacacacacatacacacaccacacacaccacactcacacatactacacaccacacccaccatacacacacacaccacactcacaccacacacaccatacacacacacacaccacacacacacacacacacacacacacacacacatcacaccacaccacacacacacaaataataacaagataaaaatcaaacaagtagagctgcatgtggttccttttgcctgaggtctcagcagccagccagggctacatagcaagactctatctgaaaatgagaagtgaccagaagataataactgcgttattggcaaactaattacaaaggcaactgtgaacataaaattcaaggctctctctgtgagaaggtagtgcaggaatcactgtctccagtaggtgggaaaagccttctgggttctacaaaagagcagaagcaagagatcccagcaggtatttggtcctcactggacttccaggaagcttcagatgttaagatgaaggccgggctactgcagtgtgtgagaaaccccccagaacaggcttttaggcctgggggcctgttatcccagcacacaggaggttgaggcaggaggaccatgagtgagtttgaagacaacctggtacagagtgagacactgactcaacttttacttcatgccacagttctgatatcaattaacacaacctggtctgcctccccagaagagggagtgcggttcctgggggaacttaccattttgaaaatcaaaccctgccaacggcagtttactttatctggcgggcattttgccgacacacatacccacgcaccatgtgcatagggtgctgagcggagcagggcgggcattggactcccgggaactggagttagaggaagctgggagctgcctgatctatgctgggaaccaaacttgggtcccctgaaagcagcaaatgctgcttaaccacggagcccacatctctccaagcccacatccagactataattttgattcatttattttatttttatgcttcaaaacgctcccagtcaaatccacccctttcacatgctgtgtctacttgggtcatccttggccgcctgcgaggcgggaccataacctgggattgtgaataaatcctccctcttggaagattgctctccttgaggtgtgttataacagccacagaatatgttacatatctatttacacatatatagcttttatcccgttacctggtaaaactctgtctcgtgtgtgtgtgtgtgtgtgtgtgtgtgtgtgtgtgtgtgtgtgtgtgtgtgagtgtgtgtgtgtacatccgtgttgaggctcaaacacatggttttgcccatgcttggcaaacaccactaaggtgcaacccctgtaattcattctttttattttattttattagttcaaattaggaacaagcttgcttcagatgtcaatcccttctccctctccctcccctcctcccaaatgtgtagcccaggctggcctcaaactcgtgatcctcttgcctctgcctccttcagcaaatcctaccggcgtgcgccaccacaaccggcccctgtaattcatttataattttttaaaatgaaacttggatttgttttcatggtgctggagagatgtcttagtagtttagagcactggctgttctcccacagaacccagaaagtggccagtaaccatctgtaattccagctttaggggacacaacacactcttccaccatccacaggcagcaggcaaacatgaatatttctaattcctcattagataattattaataactgtgtccatagagcagtcagagtactgaataaaatcagccatgcaatgaatttgacaaagcaggaagcagaaagcaattatgttcaatctacatggttattggtcatgattatatttagagaaaaaaaaaaccttctcttatatcacagtaaataccaacactacctccagcacaacctcgaactcttcaacaactatgaaaaccattgagaacaccacagcctttgcttctgnnnnnnnnnnnnnnnnnnnnnnnnnnnnnnnnnnnnnnnnnnnnnnnnnnnnnnnnnnnnnnnnnnnnnnnnnnnnnnnnnnnnnnnnnnnnnnnnnnnnnnnnnnnnnnnnnnnnnnnnnnnnnnnnnnnnnnnnnnnnnnnnnnnnnnnnnnnnnnnnnnnnnnnnnnnnnnnnnnnnnnnnnnnnnnnnnnnnnnnnnnnnnnnnnnnnnnnnnnnnnnnnnnnnnnnnnnnnnnnnnnnnnnnnnnnnnnnnnnnnnnnnnnnnnnnnnnnnnnnnnnnnnnnnnnnnnnnnnnnnnnnnnnnnnnnnnnnnnnnnnnnnnnnnnnnnnnnnnnnnnnnnnnnnnnnnnnnnnnnnnnnnnnnnnnnnnnnnnnnnnnnnnnnnnnnnnnnnnnnnnnnnnnnnnnnnnnnnnnnnnnnnnnnnnnnnnnnnnnnnnnnnnnnnnnnnnnnnnnnnnnnnnnnnnnnnnnnnnnnnnnnnnnnnnnnnnnnnnnnnnnnnnnnnnnnnnnnnnnnnnnnnnnnnnnnnnnnnnnnnnnnnnnnnnnnnngggaccagcacagcctccatgtctacacccacctcagacacagccgggaccagcacagcctccatgtctacacccacctcagacacagccgggaccagcacagcctccatgtctacacccacctcagacacagccgggaccagcacagcctccatgtctacacccacctcagacacagccgggaccagcacagcctccatgtctacacccacctcagacacagccgggaccagcacagcctccatgtctacacccacctcagacacagccgggaccagcacagcctccatgtctacacccacctcagacacagccgggaccagcacagcctccatgtctacacccacctcagacacagccgggaccagcacagcctccatgtctacacccacctcagacacagccgggaccagcacagcctccatgtctacacccacctcagacacagccgggaccagcacagcctccatgtctacacccacctcagacacagccgggaccagcacagcctccatgtctacacccacctcagacacagccgggaccagcacagcctccatgtctacacccacctcagacacagccgggaccagcacagcctccatgtctacacccacctcagacacagccgggaccagcacagcctccatgtctacacccacctcagacacagccgggaccagcacagcctccatgtctacacccacctcagacacagccgggaccagcacagcctccatgtctacaccgacctcagccacagccgggaccagcacagcctccatctctacacccacctcagacacagccgggaccagcacagcctccatgtctacacctacctcagccacagccaggaccagcacagcctccaactctggctggataaccacccacagcagctctagcctggcattttctactggaacagacaccacctccaaccccaccggcacagttggaactccagtgaatgaggagaagcccagtgggtccctaaagccttgggaaatcttcctcatcaccctggcctctgttgtcatggccacggcactccttgctggggccatctgtttcgcggtgagtgcctgatatataaagagatgcttagggaaaggaggaggaggggattacagagtccccaagtcagaagacttagatagggaggaagtagagacggggttataatctgagggatgtatccacatcctgaggagaccaggagtctgagcaaagagtgccaagaggaatggaggcgggctggggtcctaggggaggagaagatggttggagcatgaggggagagctgtggggagcaggggatggttgcagtctcatcccatggtaagtgcttggaagaaggagacatggttcttatactatggcctctttttctagagaagatgcctgtctctgagagatggtgctgacataactttctacaacacccacgactccgacctttgtcttggagaaccccaaacacctccgaggagccctacctggtcctggaggagaccagtaatctccggggtcatggagatgaacgagagataacaggtaccaccccacgaggcccaggactgcatctttcagaggagttctgagctgcttcctcctctgcacccccaggagtcccttcccaactttgtttgggtccctggcatccttgagaaagatacattctttcctttttccccatctttaccagacatgggaaggaggacaatgcattggtcatttcccaaagaaataaatacatccaacgtgtaaaatctgggtgggcgtctaaagctctgaatggaattgtctagttatatgagggagcagccttcacaatctccacagcaaaatccagagtcctcatttgagatccgcgtgttctcattttcttagtcttcctgccccaagcaggagccactaagctgctgttttagttatttttctattgctgtgatgagacaccatgaccaaggcaacttgtagaagagtgtattggggcctagaccttcagaaggttagagtccataactggcacagcagggagcatgacagcaggccggcttgtcgtcatgtgctcccacatttgagacacagctaagagatataagaacactgggaatgacatagacttttggaacatgaaagctcattcccagtgacagacctcctctggcaagggcaaacctcctaacccttcccaaacagttctaccaactggagaccaagtattcaacatgtgagcctatggggaccattcccactcaaacccccacacctggaggttcagggaaacggaactgatggcagtgatgggtctatggcaggtgctctacttctttatcccgacaaagacacccaacttaagtgaaaacactctaaagggtaataaagctattatttcaacatttgtatttgcagtggagtacaaactacattctttgagattattaaatttatgtcaaatgttaaatacatcgaatacaggttttcaaaaaattttaagaatatattcacagaagataaaaacaataacaactaagatggccagtaagcacacaagggcatttccacaccaatggaggctccagtcagtcaatagagcctaaggagcctcatgggagctgcccgagtctgagggatgggtgccaccaatgctcggggcagcttgtgaagacactatgcaggcttagagcaaccaggctgaattcacgaacaattaatttccatttattcatattctgtgtggaggggttttgcctgtgtgtgttaccctgtgtgtgcagtgttatctgaggccagcagagggcatctgatttccttgaactggacttacagatggttgtgcaccaccctgtggatgctaagagtcgaacctgggttctctgcaagagcagccagtgctcttcaccaccgagccatccctgatgctgacctgaagacacagccttgcctatgccaagtgcacagtgtgcctctgatctttagtcacagccgtttcatgttttgttttggttttggtttgtttttttttttttttttttttttttttgagacaggatttctctgtgtagctggatgaggagagctgtgctgggatcaggaataggctaaaagcagaaacaacaaagacttactgaaccacgttgaaaagctgacaagacagtgagagccgggaaataaggcatttgctaaataagattagtagcttaaaccatgcaaagatcggtttcaaagctatgctgggtctctgtatcttgttgccaaaactgcttcccaggaggaagacatgaaaagtctccaccccttctcctggggtcccagtgccaaactgaagcacagtctaccagagtttttactctgggaaaccaatgagtttatttggcttctctatagagcatagataagggactgcttacagcgcggtgggcgctcgcttctccttggccacatccagcatggcttcaggagaatgaagaaaagacagatacagaaacgcgcatggtccaggctctctgatgaacatattcattatatagcattgaacagaaaggcggggttattacacacaacaaggaggtgggtttatcaaggagacctgtttatttagtcttcttaggagcagcctttgggctataaacatccagaagggaaagctatggtggactttttctgtgcacactatccttttttttttttttttttttttttttttttttnnnnnnnnnnnnnnnnnnnnnnnnnntagctctgtctgtcctggaactcactctgtagaccaggctggcctcaaactcacagagatctgcctgcctctacctcccgagtgctgggattaaaggcatgcaccaccaccgcctggctctgtgcacactatcaataaccagacccgagcaggctttgtcgtccctctgaacctcatcctaggggggaagactttgccattttcccatgagtctgaggttatggagtccgggacatgactgcccatgtcaacaacacatattcactcagggagtccttcagtctccacatgtcccgaaataggtcatatacggagaggctttacccaacagggataaaggacccccgtagttgcacagttccgtggcctttacatactcctccccaaagccacgtgcaattaaggcagaattttgtactacagggattagggagctgctgatacccatgtgtgggtcttgtgactctccttaaccctcaagaagcccgaatggaataaatcttttgcacagagacacagctgaacccggagacggtagtcacgtgtctccaaggataatcgctcacaacatacaagtctactttatcacatgcttggtccttaaactcctcacactgataaagtcttagcccctaaattccttgtgctgtggcaaacctgtcaggtctcagagaaacctaggataagtctcactcagtacctatggctcctcccagcacttctcaccccgcccctacactaaacccctccttctcagggtctggacttcccttccccccagcttctggtccctgtataatgcagccattttgactgcatggtcccttggtctcctggctcgctcctggcctctttgtctgcttgctcccctctccccttttagttttctcttcctctctaccctccctctcatggcctggttcagtatggacccttcctgatgactctgggtcttcactccctcatatctgcaataaaaacagttgtgtcctcactttttttcccattcaaaacagacctctcttgctgaaaaacaaacacaagccccaagccagaagaccctgcaagtgtcttcctttgcagccattgactctccaaagaagtcatgcaaaaactggcctccgacctgaaaacttccccaggtcaaactgctctacagtcattcattgtggcctgtctcttctgatggcactgcttttcaaactcacatggctgggcttcctcagctttggtggttttatagtctagatatattctaacaatgaccatcccagaatttttttttttaattcaggacaggggtgggaggaggcaaacccatctactgatggaggagtgtgttagccaatgttctgccttggtaacaaaatgcatgatggtctacttacaaagagaggtttatttggctgggcattggtggcgcacgcctttaatcccagcacttgggaggcagaggcaggaggatctctgtgagttcgaggccagcatggtctacagagcgagttccaggacagccagggctacacagagaaaccctgtctggaaaaaaacaagagagagagagagagagagagagagagagagagagagagagaaggtcttactgtgttgtgtcactctggctggcttccaacacatgacaactccagggcctccttagccctgctctaagtgactgggtaatttatcaccttctccccaggaggctcctccctgcccctccctgcccttccctgcccctcctcattcttaccctcctgaagcagccaccatttcgacttaatcatcactgttgacctccccaccacacacatacaacttgccctctgcataaatggagtcacacaatagccactcctagagatccttttgaaggagaggaactgaagctcctgtacttagcaaatttaatgtgaattcccacccacaacgacgcccctctctgccaccaatggaaatgagaagttaagccagatcaatgacagcaaactcaagtgtaccttttcctatgcctgtgacttgtgtggcacacatcaaagctcactacagtttaagaagcctaaaatcagggctccaaatggttagaaccacggccaatgctgagaaaccattattaaagaccagggaaatgggtgattctaagcttcctcctcactcctggaagaagccatttgcctgctttacaggacccagaagccggactcagtcaacacccaccttctttctccactcttaaggggtccagggccagtggtacatgtcagtcacacagcaacaccctctaaatgcccagcttccctcacacgaaaaactcatgttttaagtatgtttacaaatgttgtgttttgcctgcatgtgtgtatgtgaactctgtatgtgtgtggtgccgggagaggccaaaaaagggtattggaacccctggaactggagtttcagacagctgtgggctgcctgtgggtgctgggaactgaatggtgttctctgcaagtaggacacaggctcttaaccgctcgcttcaggcgcccaggtgagattttagtagctgattaagtaactggtccccaggagcatgtgattaagttactgtggccaaggacccttaagtgcagacctggagatgctaaagctcctgttggggaagagcccatgagaccattgtgtccccacaaccctgccaagcccctgaagtcagcgaagaagtgatttgtggtgatatctggatggtacaaataaagcctgcccaagaacccatttacagtgattcaaccaataacttttttgtggcgctggggatggaaactgggttttttgtgtgcgtgctaggcaagaactctacccagagctacaccccaaaccttcccactgcaatcaagaaagccagatgtctcaccaccattcctggaaaacagctacccagatcttatcaaagatgttggtcggcgctctcccttctgaagccttgatgaaggaagcttcaagcggccattctgggagaacacgctggagtcagttacacaagataaatcaactctaatatagctagtcaggggtgcatacctttgatcccagcactcaggaggcagagacaggcagagctctgtgagctccaggccagcctggtctacaaagagagttccaggacagccacaggactatatagtgagactcttaaaaataagggggctggagagatggctcagcggttaagagcaccgactgttccgggttcgattcccagcactcacttggtggatcacagccatgtataactccagtttcagggatccaatgttcttttctgaccctctaagggcactaggcacatatgtggtacacggacatgcagacaaaacactcatatgcataaaataaatctcataagaagtaaaataaataaataaataaataataaatggcagggctggagagatggcccagcacttaagagcatttcctattcttgcagaggacctgtgttcaattcccagcacccacgtggtggctcacaaccatctgtaggcacacacagggtacacatatgtacacataggtaaaacactaatacacataaaataagaatttgttttaaagaaacagggtcttggccaggcgttggtggcgcaggcctttaatcccagcactcgggaggcagaggcaggtggatctctgtgagttcgagaccagcctggtctacaagagctagttccaggacagcctccaaagccaaagagaatccctgtttcaaaaaaccggaatagggtctcagtggacagaagaacggtcctcaaaatgctcacacgctaattcatgtaagcgtaagcattgaccttaacgactttcttttagatttgttatgcagtgttctgtctacatgtacccctgcaggccagaagagggcgccagatctcattacagacagttgtgagtcaccatgtggttgctgggaatagaaactgggcccttggaaaagcaggcagtgattactactgagctgtctctccagcccctgtaaaaccgactttgaaacatgcttgcctcatggttcccacaatggggaaagtgtctggatcatctgggtgtcaccacagtttctaacacatggaagacaagagagccagcatcagaacaaggtttgaagacactgaggtggaaaatgggaccaaccttcaaattcaggggtcacattcagatgccagtgaccaagcagaaacttatagacactccagaaaccagtgttcaggaaggtatacagagtcctgataaagtgagtctttaaagctccttattatgtcttcattccaaaaggcttctgtgtgccgagctctgagctgggaatttggattcacaaccacttagtcctcagagccatcctacggtgtgaagactagccagtcactaggcagtgagaagcctgccactcagaaaagtagctaacacatgagcaagctgagcaggtttgttaactctggctgggttggaagatttatttatctttctgtgttagtggcttccctgcatttatgtacatacgtgtgtgtgtgtgtgtgtgtgtgtgtgtgtgtgtgtgtgtgtgtatacctatgcaggaatcgaggaggtctaaggggccagcagagaccatgggagattgccctaatagtgacggcctcagtggccctggctatgattcttgctcctggacttgcagcctctcttgtgagtacctacagagtgggaaccctttttctaaccaggagtgcaggcaagtgaagacaaagtctcttggtgggggtatcaagaggagggactgagaattgcttacacagaaatgatgggctagaactagcaagagagagggttgggaaagcccagtaccatctagacggtgtatagttgggcagaagaaataaggagtgagctagagtcctcctgcaaccatggaactgattgagagatgctgtgtctgagtgccccagaaggtgaagatatctcaccatcctcagcagaaggaagggaactgactgacctggaggacccagccccagaagggcagcttcccctgtctcccctgcagccaagtagcctccctcctgcgtggcttcccactaaggcatcataccctagtgtttgccgtgtgttctctgttgctgtgataaaattcttactgaaagcaatttttgaggggaagggtttctttggcttacacttggcatccatcactgaggaatgtcaggacaggaactcgagacagggacctggatgtaggaaccatgaggaatactacttgctggcttccctccgctcactcactcctgcttaggcggcttttcttatacagccaggactacaagctcacacccacaccccaactatcctcagtgggctgggcccttctgcataaattaacttccaagaccaccgcccacagctgtgcccacaggctaacctgatgcaggcaattcctccagtgaggttttcttctcaggtgtgtcgagttgagaactcaggctaaccaggacacagggaaacactcttgctagaattcccccagttcttaaatgccttggggttctcaaatgccttgagtgaaactggggagcaggtgtgaacgtcatagttttgtgctgcacagccagtgagacacggtctaggtgagatagaccaggtaggggaagagggttgcattgtgtggcttactgatagggctgtcccagattctctctcagcaagcagttccaaagctgtgagacctccacagggaagacaggttaccaacacgtttctctaaccagcagaagcctgcagagagaacagctcctcgggcctgcccttcgctnnnnnnnnnnnnnnnnnnnnnnncagcagatcttgaaaagcaggcctcagacaaggccaccatgacatctatccagggtcctggggcaactggccgcttgcccacacacctgcctcatcagtttaacactatcaagtctcttctgcctctggggttctcacggcctggggcttgactagaatctttggacccaagctgtttctctaggcacagtccacagtagccctaacagaatagcagctgcactgtcaggataaaatgtgatcaggaacagaagtcaggattggtttcacagacctttaatctcagctacagaaagtgtgaggcaggaggatacaaagtttcagaccagcctaggcaatttaccaagaccctgtctcaaaacaaaaagtaaatttaatggctaggcagatggctcctgagtgaaacactcgctgtgtaaacctgaagactcacattcaaaatgcctatattagaaaaagaaagctgggcatggagtgcgtctgtactggagagagacgggtctctggggtgtgctggccagacaatctaaacaactgatgagcttcaagttcaatgagagaccctgtctcaaaaacaagtaaggaggagggtctggagagatggctcagaggttaagagcactgatagtgtaaggatgcaggcattatgctggcctgcccctgtcacctggggttgctggggattgaactcagatcctctgaaagagaagccagtgctcttaacctctgagccatgcctaactcctcacctttttaataataagtaaaggtgggaatgtaaggattcaggcattctgctggcctgccccggtcacctggcagaatgtactcaggcagtactctggtcagcccagggttccatgagtactaggtctgtatgcaggtgtaaaggacccctttaaaagacagactctgcccacttaagctctctcacttgctctcttgcccttcacctctttctctcttctccctcccctttaatcaactccacgtggttaacgaatctcttggttcatgttccatgctattgcgctataactgaaacaaaagaacaactgatagaatgcttgcctagcatgtatgtttaatctttagtcctgaagggagggagggaggacagaagaggaagggacagagaaggaagcaagggaggaaagaaaaaaggaaaaggaaattaagctggacatggtggcacacacctctagtcccagcactctggaggcagagacagatggatctccgtgagatgcaggacactcagtgctacaaagagagaatctgtctcaaaagtaagcatacacagcaaacaagaaaagcaaacaaaggacaggtaaaactgattcgtggtaactgaggtctgccacgggcctctgagagtgggaagtgttagaaaaagagctttctgggtaacggatactttgtgtcggctgggctcttagtgacacagctaaaaatttatcaaaattgggctagagtgatggctcagtggttaagaatacttgctgctcagccgggcgtggtggcacacgcctttgatcccagcactcgggaggcagaggcaggcagatctctgtgagttcgaggccagcctggtctacaagagctagttccaggacactgtgaaaccctgtctctgaaaacaacaacaaagaatacttgttgctcttgcagaggacccaggtttggctcccagcacccaaatggctgctcacaaccatctgtaacttcaactccaggggccccgatactctctcctgacctctacagacaatgcatgcacgtggcccacttacacacaggtaaagcattcatacatacacataaaataaaaatgaactcgatctaacggaacgcttaagatctgtacattacaatgcaaattttacctctatgaaaataagaacaatgtaatggttttcataagacaataccctgaagcagtgactctctccagtcattccagtccctcatcctttaagacctccatccgatttctcttgcactgaatgtatgaagtacctgcttggcacctaagaaggtccctagaagctggggagatggggcaggctgggcagggggcaaggatgacctgagggcactgggggggggtgttggagacaggtttataaacaggtgacttgtagactgtggccaactcttttcaatcgtcctgccccacagggaacttggcccaggagaggcaggactgctcacacagcccaagaattacggggcagatacaagagtacaagaagtgctgggcaggctgcagctgcaagtcagggcatggccaaaaaggggtgagaaaactcatgcaactagatagcatcacacagggaaagccctggggttagcacagggctaggaatgccacacagaggagtcaggagttcagcctgtcataacaggaagccagtcagcaaggcagagtagggtctatgggacaaaaaaatatcaaacaccaccacctttaatcccagtacgcaggaggcagaaggaggtggacgcctatgagttccaggcttgcctgtccacgtagggtgttccaggtgagcgagcacctacataataacatcctgactcagaaagaaagggagagagggagggagggagggaggtaaggagggagaaaaagaataaataaaggaaagcaaagcacagcgtgaagttcagcactccacagcacgcaaacttacaccttagtccttaaatgagaagaaggcagagaagcagcagaggtctcaactcctggtgtggcaggggaagagactgaaacagaccagactcctaacatagatgatattaaattattttagatttacttattttacatgtgtgtgtcttgccctcatgtatgtgtacactatgtgtgtgccaggtgcccaccgagagcagatggggtgttggatcccttggaatttgaagtactgacggtggtgagcctccatgccgggtactgggaattgaggctcagtcttctgcaagagcaacaagcgctctaaaccactgagccatctctccagccccctggactgtattagaaatcttaaaaagttaaaaaaaaaaaacaaacaaaaaaacaatgtggaccgttaaaaagtccacggggcgcccaccaggagctgcagctgcgctgtcgtggaccagaagacttcctctccccgggacaacagacccattctttccggttgccatcagtattcactcagggtgttgagctgcctgctgcagctgctccactgtgcgtgaagaacagcaccacagagctgcggacggcttagagagtggccaagtcccaggaacttcgtggttgataaaaacaggagataaagttgttaggttggcatggataaagattcggtctgaatatatgcttagcgtgcaaaaataaataatggagggaaacatgccacgacatcctagtaactatggaaacagtatccatggcaacaaaggcaggcccgaagaggccatcaagactgcctgcaaaccccagaggatgcgtgctcaggagccccctagtggcaataattgggtagtgagtgacccagggatcggcacctctccaaagaactgatttattcacaaggactacctcaggggaaggtggctaaaatcgaagtccccaagctccctgtcacaccccagctccccgctcgacagcgctcgaaggcctgtaggcacagcacacgtccagtggactcgttctgactgactgttcttgcacgcatcactcagaaaggaaggtaatcaattaggctaggacgtgacgctggagctgacatatctccgctcggaagttgtcaaatgtgaaaataatcgtgttttcataacccacaaaatgcgataagtgacttggtgagtcacttaaccgcggggcctcccgtcctcactcatagcagtcacaccctttggagcttgatcgttctgcatacctaactaactaactaactaactctgtgaagagcgagcgagcgctgactgcagcagggagggttcaagagagcttttgtcatgcaggtgccggttctctccttccaccccggggatcctggggcttgaactcttgaactcgggtcttcatgcttggcagcaagtgccgttgcccactgagccatctctccagcctattgcatgatttcttatattgctttgttttctgtttttgtttgttttgacagggttgagtttatctcaggctggccttgaggtctacatattgccaaggataactttgaactcccgatgctcttgcctctgccttccaagtgctgggattgcaggtatgcagtagtacgcctgtttaactgcagggcttctgatgacctttgccacactcacagtggttccctgacaagctatgacagagtgaaaacagaccagataaggtatcagagcaccagggagctcgtgtagctgggcttctttgccctgttagtcattctcagttccagtttggctatcagttcatcaatggatatggtcatgtcttgcttgctccacctagctcctggttgagggagacaaggctattttgttgttgtcattgttggttttgtttttgagtcagggtttctctgtgtagctttgtagacaaggctggccttgaactcacagagatccacctgcctctgcctccgagtgctgggattaaaggtgtgcatcactgccaccgggtctaaggctatttttttctcccaataagatccttcaaataaaatacagtggcagtcaaaaagcaaaggaggcactggagagatggctcagaggttaagagcactggctgctcttccagaggacccgggttcaattcccagcacccacatggcagctcaccactgtctgtaactccaagatctggcaggctcaccagacattcatgcaggcaaaacaccaatgcacataaaataaaaataaatataaaaagtaaaacagggtagtaaagtagccaggcatgctgacaaatgtccttaatcccggggctggagagatggctcagctgactgatgttccagaggacctgggttcaattcccagcagccccatggcggctcacaattatctgtaactccagttacaggggatctgacatcctcacacagacacgacaatgcacagaaaagataaaaacaaacaaatcatttcttttaagtcaagacactgagtatgctggtgaaaatgtgtacctcagcacttgggaagtggaggcaggaggattgccttgagtttgaggctagcctgagctacacagtataatcctgtctcaaaaaaaaaaaaaaaaggcaaatgagctagaaggggcagggcaaaaatgaagactacaaatactaaacggactccctggcttctgttcagatagatgagtctagtctgtctcctttgaccaaatggggagaaaactgcgcagttaaaacagggtggagtgggcagtgtccttagcagataagattgtccatgggaaatcctacaagcagtgacttccacagccaggtctcggcagggatgggcacagcaagtacctctagggtgcctggacatagttgacgagctatgagaagcccacaccctgcctgaagccacgtggccctgggactcctgcattccaccctggtgactggtttgctctctgagcctgccaaggagatcctggtaaccatactgaaaattatttaagattaagtaaaatcctgtttccagcccccacccccacccccaccctctcggctcttcccaggctgtactgagaacatggcaaccagacctggcccaagaagactaatgcagaaataaataccctctgcagagagtggccaggccaagtgacactgcagggtcttcagtgaggggctcctacgaggactaggctgctgtttgcttcaaacacactccttcagaaggctcctctgaggagacaagtaggcccagggtttaggtttcctcgaattttttcaccctcctcagcacaggcaaaggtctccagctgtgtggcctccgttgactccattggcagcagctggtgactaactgcaggtgcagggctctcctgtaacagcttcgtcacacctgctcagcctccaggccagtttccctcagtccgtgttccagccccgccatagccttccttcacggttacgttatttattgagtaacccatcctctgccttggttgccccagcctttctcggctgtgccaccccgttgtcctttttggttttcttagatcttaagatgtggttagcattttcttacataaaattttgtctgtggaaattatgtatgcccatattctcagaatttggaaggctgaatcaggaggatccctggaagtttgaggttaacctggtccacgtagtaagttccaggccagcttgtgctgcaaagtgagatcttgcctcaaaaataaataaaatccttagttatgaaggattttctcctccacctcaaatggagactgaatatgaactgcttcttctgcaggaacggttccacccattgcaacgcaaggaagcccctgggaaccacacctagacctcaggtgaagatgccagccgccaggcaggcagggtagcacacacttgtagtcccagcaccgaggaggtagaggcaggaccatcaggagttccaggtcatcttcagctccacagagagctggaggcctgcctgggtacctgagaatgtctcaagaacccccaaatctggggctggggagatgtctcagctggtaaaggggtttgctcacctccaagcctggtgacctgggttccatctgtaggacacatgtgattcctacacggtgtgtccttggacaacacacacacacacacacacacacacacacacacacacacagcactttcggaggacccacgaggtggctcacaacagtcggtaaccacagctccaaagacctgccaacctcttctgccctccacggacagcaggcacacaagtgattttcctacatacaatcacacaaaacacataaaacaaacaactaaaaacaaacaaaccaaccccaaatccaaaaatagtcaaacagacaaacacaaatgtccgccaaggatccaacaatacaatctgaggacaggagccaaccatgatgtaaggtgagcccagaagccttccttcccggggctgagcgagaggacccacgggaaggcgaatttggaaggcggcgccactcacttctgcaccagatggcatggcaagcggcatgaggccctggctggcatcgcttcaatgctggggccacggtctgggggatggggaggcagagtgctggaggtgagaggggcagcaggaagccactcactgcatgcaaggcccgaggcactcagagtccctgtctgggccagcgcgtcgagagaacgcgtgcccttagcatgcagctgggaccgagacccctgagtgtgtcggcgctgaccaccaacggctccagccccagcagccaccagaaagccagcgttctttcctccgacagcgtccctccagtgccctctgctgacaaagctcgatattgcgctggctgcggaggacacagttgttggaagactactgggagctgagaacctgcaatcggataggcatgagagccacgtgatgagagttgttgataatgatgaaaagcaagatttgggggctggagagatggctcagcggttaagagcactgactgttcttccagaggtcctgagttcaattcccagcaaccacatagtggctcacaaccaccttgaatgagatctggtgccctctgctggcacgcaggcagaagacataataaataaataaaatctttaaaaaaaagaaagaaagaaaagcaaggtttggaaacccagaattaagaaaacttggtgggaggctggagagacggctcagcaggctgttcttccacagccgtagaaggatttggtgtgttttacttggttttctgaaactaccactccaaattacaaaatcacatagtttattcaatcgtatgtaaaaccagggtctttctctgaaaagcacaggcagtgggtggaaattgtataatttcttaatgcctctttcaatgccgggattaaaattatggggccaggcagtggtggcgcacacctttaatcccagcactcgggaggcagaggcaggcggatcactgagtttgaggccagcctgatctacaaagtgagttctagtatagccagggctacacagagaaaccctgcctcaaaacacaaaacaaaaattatgtattcatgtagatcagtcctaattcaaatatgaagttttggtttgtgtttgttttttttttcaagacagggtttccctgtagctttggagcctgtcctggcactctctgcagaccaggctggcctcacagagatcctcctgcctctgcctcctcagtgctgggatcaaaggtgtgcaccaccaccacccagctgaagtttgcttcctaataataaaatagattgcccaccatcttttcaattcatgtaaaatatattgttatattgcctcaaaaataattaatcaagtacaataagaataaagttattttcaaaatgactcaaaatcctctcgtttgcctctctcctcagaagtcactactgtgtgtccatcaaaatgagggatacatcaagagacagagacatggaaccctccggcgggcggtgaacagaagcctcccggggccagcaggcccagatggaatcagagtttgggccaaaactggagaagaagaaaaaaatacttgcatggtttcggaagcacgagattgattgactgaaaaaaggatgaaatagagccaggtgtggttgctcatgcctataaaccagcacctgagagactgaggcagaaggatcgctctcagcgtgaggccagcctagactacaaacaaacaaacaaacaatgcagaggggtctggggcctggctggtggtagcgacggcctagcgcatggtgtggtttctgcgtgagacttgtagaattcttttaggaattgattacattaaggcactaaagaattgtactaaattaaaaaaagaaatccaggctggaaagatggctcagtggtaaggacacttgctgctcttgcagaggatccaagtttagttgattctcagcatccacatccagcaactcaaaaaaaccatcgggaacaactccggctcccggggatctggtgccctcttgtggccacaacagcacctgcatgtttgtgcacagacatccacaaaattaaaattaaatcttttaaaaataagtcaataaaaatatttttcaaaaactccaccactcatgaagaccgtctcttccctttggcgatggtgtctggacatcctgcattctcggagccatgagcctctcagcttcctgtccagtgctgtagtgtgtctccactcgcacgtccctcctgtccagagccgagcgcggtgcagtccacacactcggaccatggtgtggttttcagagccctgtcttctccacggttttgtttggtcatctcctgatttccaccccccttccagaaacccaagactcgatgagccttctgctaatggagctgctgtgctctgtgccttgggactcggtgcattgtgtgacccctgagtcttggccagagtccaacagaaagacagctgctcttgagatttgggactctctaatggcttgggcgtgagtttccggagctctgcgcacacagacaacacctctcggtatttttttaaaattacttgtgaagtcaacattgctttttttttaagattttttttttttaatttttggttttccaagacgggtttctctgtagctttggagcatgtcctggcactcgctctgtagaccaggctggactcgaactcacagtgatcctcctgcctctgcctcccgagtgctgggattaaaggcgtgcgccaccaccgcgcggctaagtgttctatactctgccagcaggaggtcggtcttcgaagatgagaaagcacagatgggctcctaaatccagaagccctctatcagccgcctgccatccatccatgccctgctgagatctgaggaaacgggagtgatggacaccccagctgaggctgttccagaaggcaggtgccttgagagttagtgaatgcctcctgtcgggagcggtgtgcccctccgctgagaggaattccagaaagagatctgtgcctgtcaatagcagcggttaagagcactgactgttcttccagaggtcctgagttcaatgggggcgtcctagactcaggacatggtggcatgatagccgtttggtacatttaggaaaggtggactgtattgcatttaatggtttatatgactggagtcttcatttctcctgttacccggagtccatacctaccatagggtgggcccatcgatgtctcttgtaaaaacctgcgatccaggctgctctcagctccccactccgcccttccacagcgcacactcttaccctcgttactcagctgctggtgtggcccagaggtggatcacttgcctggtgtgggcacaaggctccgtcccaagcatgaagatgggggcgcaggtggagaggatggccattatccggagacagttcagacattaccgtcacgtgttgatcaggagactagacaaggagagaagcaggagtatgacccctgttagagcccgagggatccacagaacaaataccgactgaaatacgggtctctttctagatctttcctaagacacagtggtcctactgagcacaggcattactggtccattctatcccctgccccttttttctttttaagacaggttctctctacatagccctggttgtctctgtagaccaggctggcctggaactcacagagatccacctgcctcggcctcccgagtgctgggattcaaggtgtgcgccaccacactcagccaaccctatagccctttaagagtgataagataaaccgggcagtggtggtacacacacacacacacacacacacacacacacacacacacacactgtgtgtgtgcgacctcagtggaagagactatggagaatggagatgagccggggctttggcggggatgggaggaggtgatgcggtctcacgcgttggaaggagcgacagcgccacctcgtggtaacagcggcactttgccttctccagggcctaaccgtgggggtcacgaacattttcaacaatagaaagtttctgggtgcacaaaaataaataccaaaccgaagacctaacgggtgtgggtgttggtagcctgtgcagcgcgctggcactccaccgcagccttggtctggaaccaaggcctgcacaccaggccctcgcggcacaagccgtgggaagcaccgacagacgctgcctaaaaggccgaggctcggatcccagacagtgttttactctgtagcccatttctgcaagnnnnnnnnnnnnnnnnnnnnnnnnnnnnnnnnnnnnnnnnnnnnnnnnnnnnnnnnnnnnnnnnnnnnnnnnnnnnnnnnnnnnnnnnnnnnnnnnnnnnnnnnnnnnnnnnnnnnnnnnnnncagaagggttttgtttttttggggggaaggaggggaatgggggggggggggcggttaggcttcactgggactgagttacaggaaagtagctgtgtccatgagacacctgtaagacaccacggactcatgagggagagaacgggaaaagggggagaccaactgctattaactttgaaactctgggctcacactcctgggctctggatacccaggatgtcagcgcacggtgccagcgtctacgggcagagcctgccttctactggcggttcccgggatgacaggtactttttttaaagtgtaggtcaccacaccctctcactgaggggaaaattaatgatgatagtcttggcaatgaccggaatggcagctgcctaagtgagtcccacgactcatcatttaatccttgctaagaggagggtgataggacctaccctgttctacaaattagacgtggaggcagcttgtcccacctgctaccagccaatggctgggcacgcatccatgccaaggcctgccgactcagggtcctgccttggggcccttagcgccggccctttcccttttttttccctggaacttcactcatcacacatggccttgtcttctaaagccaaagggccacaccgtgtgtgcaagcctccactgctcagcagctgcatagccccaagactctccacctccacaccaagaaaagaaactgaattgaactcaggactgctgctaggtttccagtgcctgcccacttagctaccaaggtaaaatattcttgcccatagtccacggtgtaaactacctaggaaaagcagactgccaatcagactcccaaatgatgaccatgaagtcaaggtcggagagggggatatttgggggaacatctcaaccaggcctgcacaggatcatttacacgagccttgttttaacatctaaagccagtgtgacacggtgctgagcatctaatttcctaatgttgggtggcttcatcccaacagccctgttctgtgggagctctgactagccccatttcacagataaggaaactgacgtggagagagcttatgcctgtcccattagttacattagccagagctgtaattattcaatgtcatgagaaaggcagcatgagcatggggaggtggccaggggtcaggacactcacccgtgagtcacgggcggatgcatgggcttgtctgtttggtcgttctggtcccattgtaaagcactcggcatggtccttgaaaaagaacaaagttagatgttgaaaagctctgggacgcttcccccaccagactaaccatctgtgaacggactcttaaacacatcagctgtcagtaaccagagaggatgccaggttcccttgacctttccggtcctcctcaccctcagggctctgaatagaatgtggtgggggcaggaccaacctgtggtctagacgcctctatttacctgctcttcccatggtcactccggcctgtccagtagctgatgacccctgctctcacttagtgttactctcaaaattttaacaaagctgctttaagttaatgtttgcatgcatatgcagatgtgtgtgaacatgagggccagaagcaacctcagacatggttccttccactatccatccacctggtattctctcattgggatctggagcagggtggccagccagtgagccccgggggcccattgtcaccagcaaattgtaaccattttctatcacacccaactttttaaaaaacattatttatgtatatgaatgtattcatgtgggggctggagaggtggctcaaaggttaagagcacagactgcttttcccaaggtcctgagttcaattcccagaaatcccatggtggctcacaaccatctgtaatgagacctggtgccctcttctggcctgcagggatacatgcaggcaggacactgtatacatcataaataaataaatatatcttttaaaaaaaaaaatatgaacatgccgggcattggtagggcacgcctttaatcccagcacttgggaggcagaggcaggcggatctctgtgagttcgaggccagcctagtctccagagggagtgccaggataggctccaaagctacacagagaaaatctgtctcaaaaaacaaaaaacaaacaaaaaaacgaaacaaaacaaaaaagaccaacaagtgctcttctatgctgagcagtgtctccagccccaacacccggtttctaacacatatgctggagattgagctcacacctgtgtagcaagcagcttcccaaaaagccatcttcccagtgctaatactctttaaagcacagaggacaattcgttttccttagtttcccctctgatccttttttccctccttctgtccccagttccttactcccctaaggttcctcaaactttgtgaactagaaacctctggagccagcatctagtgggtggatggaccatttactagacagaggaaggggtgggcggatgacaggatcagggtgaggagtgatcctagctttaagggcggttcatagggtaggtcagccggtccgtcagtgggcggtaactggagcatttataaaccgattctgattcaccaaacatctgaatgcccttcctgacagccatgcctgccctaggtgaggataaggagcaaaatcagcctggtccagagggtcaggtggctgcccaggactgacactttgtgtgagctccaaatctgcagccagctggcctttaagcagggaatggctagcttagaggaccagaggtgacaattaagagactgactaagctccaggctggagtcacaaggagccctgtgtgaaaaacaagggtataaacaggaaactaatttaataattatgcaaaggggacctccctcatgcatgcgccaggccaggccagnnnnnnnnnnnnnnnnnnnnnnnnnnnnnnnnnnnnnnnnnnnnnnnnnnnnnnnnnnnnnntggggcctgccaagccccaggcacctcagttgtcctgagtacacacagggcatttccctactgaagctaagagcacctcgatctacaatctacctcatggatcacccacacctattccctcccagccccttcagcattccaagaaatcgtttgaaatggtaaatgtgggatcagaagagagctcagcagttgagaatgggtaatgcaggaggtcccagggggtcccagggggtcccagggggtcccaggtcagctgcagcacctgcattgggggactcacaactgcctataaccccagctctcccagatcctatgtcctcttctggccgccacaggcacctgcatgcctgtggtgtgcagacagacacacatgaatacacaaaatatttttaaaaaaattttttgagacaagatctcactgtgtaatctggaactcacagaaatccacctgcctctgtctcttgagttctgggattaagtaaaggtatggaccatcatgcctggcaaaatttctaaagaatatatatattctatatattggatgcatataatacatactactatatatacatatatatgcacacacacacacacacacacacacacacacacacacagagagagagagagagagagagaaagagagagagagagatagagagagagaggagggttacacagctagtggatggacagtctgggctccttaagtcagcaaattaggtaatttgataccatttgtctaatttaaaggttgtcaaagctggagagctggctcagaggttaagagcactggctgctctttcagaggacttgagttcaatccccagcaacacatggtggctcgcaaccatctacaatgagatctggtgcccccttctggcgtacaggcatacatgcaggcagagcgttgtatgcataataaacataccttaaaggttgtcaacaacagatgaattagctctttttatttccaatgctgaagaccaaactcaacactccatgcgtgccggacaagtgctctatcgccgacctatctccttacttccagggagaaaaacatcttaccgccaactcttacttcaaacgcgtccctcggaaacaacgccttcagcgcgagctccaactctcatttggaagccagcacctcgtctacggtttcaaatcatagtctccacttaaagagatgagcgtctcacggggccgcagagacagctcacttaagagcattaccgcccttgcagaggacaggggtttggttcccaagacccacaggtggctcacaaccatcagtaactccagttctaggggatctgtcgcctatactaacggacgataaagttttgtgtgattttacttacgtgaaatgcttcggagaaacccattcacaagaacagaaagtaggcagcctagagctgggcaagggctgccctcagagggcctgggcagggcccaaatctgtcttgtacccctttagtctgcacattggaggcctgggaagccttcatcttctcagcgttctccggagtgtggcgccacactgaaggtgataatagctccctccaccctctatgtactgtgaactgagtatgttacaaggctaccacaattctctaacagcgttaggtctgtgatttcccacttacagatagccagtcccagagcccagtcaccagacactttcagcgctgagatccagaaggcaactggcacagaggagacgagactcactagcccagacagttagtagtctttcctccagccaggctgttttcaacctcatgtctctcatgtcggtggagggccagcagtctgtttttggtattacctgtctgtagaccagcacctcatgtgtcctgttcctcagaggggaggggaccctttggctgtttctgctgctcccttttcttgcaagaagcttgtgaaaacaccaggaatgtgtggtcacgtctttctcaccggaacgtttgtcaggtgcaatctgttgtcttggtcctgaaggcctgtgtggttcaggattggggatggtaggtggataacaggagcttcaggtcccattgaaagaatccaactcgcccggcattggtggtgcacacctttaatcccagcactcaggaggcagaggcaggaggatctctgtgagtccaaagccagcctggtctccagagcgagtgccaggacagcctccaaagcaatacagagaaaccctgtcttgaaaaacaaaaaacaaaaaacaaaagaacaaaaaaaaaagaaaagaaaagaaagaaaaaaagaatccaactcagggagttgggatgtagtcacatattggcaggtaggctaggctgtggggaattttcttgattaatgacaatgactgaagtgggaaggcccagccccttgtggctggtgccagccctaaccaggcggtcctgggttgtttaagaaatcaaactgagcaagccagggagagcaagcaggtgagcagtactcctccatggtctctgcttcagtccctgccctgacttccctccgtgattgtcttagtttgggtttttctattgctgagatgaaactataaccaagttggggagaaaagcacttattagacttacacttcatcattgctgttcatcactgaaggaagtcaggacaggaactcaagcagggctggaacccagaggcaggagctggtgcagaggtcatggagggggctgcttactggcttgttctccattgcttgctcaacccacagggatggccccacccaccatgcctgggccatcccccattaatcactaaatgggaaaatgtgttacagctggatctcatggaggcatttcctcagctgaggctccttcctctctgatgactctggcttgtgtcaagttgacacacaaaaccagccagtacagtgacgggtggtgctgtggaagtataggtcaaataaactgactataacttcactccggggcatcccacatcttcttctggcctcactgggtaccacatacttgtggtgcacatatattcatgaaagtaaaacactcatacacataaaataaaaaagttgggggctggagagatggctcagcggttaagagcactggctgctcttccagaggacctgagttcaattcccagcatccacatggcagctcaccactgtgtgtaactccagttccaggagatctgacaccttcacatcaatgctcataaaataaatttaaataaactagttttaaaaattaaagaccactctgacacgattgactacagctactcagaaccctctaccagattctgagagtcaccatcagatacttgccaaggccagcttcaccccccttctcttgggtgttgcctgtccagtgtgcaatccctcagcccacccggtttgggcctcagtatctcccctgtacaagcagcttcttcctgaggggaatttctgggaagattagccggaagggtgtgtgtataaacaccttgttcatgatctggcacacataataaaagttagttggtatttctgctaattgcctttgaatcggaacactccctggatggacgaggttgaagtcactgcctctgtcatccatgacttgtgtgtgtgagttgcttcatctctctgactctgtgggtaaaaaagaatcgtaaaacacttctgtcacgggtaataaggagggtgagatgatgaggtgtgcagagcgtagcaagagccgagaacagtctcatgaggctccgggagggacacggcagcagttcggaccaggctctgtggagacttagtaggcagctacacatctgagataaccgacttacagagaaaaagcttttcttgaactcacggttttgaaggatgcccctgttgtcttggggcctgttaccccaaggcagcacacaggggggagcatgcattgaaccaaaccaatcacatcatggaaaaccagggagcaaagagaaaaggggggcagagtcctgtggtcttatttcacggcccctctccccaatgacctggtgtcctccctgctaagtcctacctcttagagcttatgctacctcctaagggcggaggccgagtctgtaaccggtggtgagaccacaccatttcagggttgcctgtgggtgggtgagagtggggaggtacctatatgaatagatgggccaacagacagacagacagaggacatgctgaccattcggtgtttgttgagtgcctgccctggtccagacactgttctagaggtgcaacagtgtccttgtctcactggtacaaaattacaaagggtctgtgacacagacacataaaaaagcatagggctgggtggtggtggcacacacctttagtcccagcactcgggaggcagaggcaggcagatctctgtgagtttgagaccagcctggtctagaagagattgttccaggacaggctccaactacacagagaaactctgtttcgaaacacaaacaaactaacaaacaaaaagagcatataggagtgcctgtagcaaggtggacaactagaatgagaaatgaacttgcgaacctgaaatgaccttgagcccgttgaaaagaaaaagctaaaaacagtcccctagtcttaccctaggactgagaaaagtagagtccatggagggaagagatgaattcatgcgacagggaaaggtgtggctggttaggggaaagatgggatcacgaggaagtgttttcacaaggattctcaccacagacaccaggacagcatgtcccacttgagcagatggctcccatcccttaggctctacctgcttctctcctacaaggtgcccagccttctggatctggggtgatgccaggctgtatcgagggtacacacacctggaccaccgagggcaaagtacacagtggagaaaacgcagtcaagtctttccccactgacttgtgtcttcacctttgtgagatccacccttactgccctcactctcctcctggaccggatgctgagctcccgggaaaaccaaagggtggagggagagacaacagctcaaccaaagaaaggggctgtgtgagcccacgagaacaaagcaacggatgctgccacagtggttgttggctcggaggcctggcttctgttttctctcttcctttatctatcggggctgctatttgttcagcagatgttcaaagtctgtgtctctctgcacacaaagcgctaagtgatgcgtgtgagggagatcaatgtcccctccacttccaagaagcttgacggtctgggaataaaagataagcgtaggctgtatgaccttccctggccctgtgttctgtgaaaggttttttgtccctcctggcctggtgccagcttggtggacttccttccctccctcctgtcacaggtgaactctcaactcctcccaggaccattctggaactaactccctggacctaggtgaaagcacagagcgggcccaccctcaaacacctgggttttgatctctctcccccaaaaatggggacaacaagatgggctctacaggggaccctagagagacagggatggctagagaatgagggcggcccaggcacaccgccattactcccagaaacaaagacacggagagacatggagttcaagaactgcttgtgtttatttgcgaccagcttaggtcaacagaggaagcatcaaaatggggcgagaaggggaaaccgtgtgacccagcctgacgaggcttctggggaactcactggaaactggggtttgggatgttcccagaagaaccaggaggtcggactcttgggggaagccgaatgggacgattggggcgattggggcgaggaggtcggactcttgggggaagccgggggcgaggaggtcggactctcgggggaagccgattgggaccaggaggtcggactcctgggggaagccgattccacccattacttccccagcttcctgcaggattccacccatttcctccccagcttcctgcaggattccacccatttcctccccagcttcccgcaggattccaaccaatacccccccagcttcctggaggataccgagcattgcccaccaagccggtacctgataactgactattgctaccccatattccagaagggtatggcatgggccgtcttccccacgcagttcccgcccctccacctccccaaggacttaggatcccccagggaaaaccaggcagcaacctgcggaagagaaaccagaatgggtgctgggcaaagtcttctgcctcggttctcagtgcactggaatcaggctctgagtcctcggaagcctcggttgcagagaaagccacaggtccaggactgcccctggaaaggtatggcagggtttctggcagcacttgctccaggcggtcttcggcagcagcctccatccctggctgagggtcctcgtagaaccaggactccgtgggcgacccctcccagaaggaaggctggctgagctcctctgagtcctcctcgggtagggcgccatctggtggggattcggcgagccttggaagagcccttggtagttcattattagcagggtctggcttgggctgaggctgtcccaagtcagccgtcccaagcttgaggctgtcgaaggaaggttttcccgcctgtggggagattttctcctctggtgccccaatgctccgtgcaaagaggcctgattgggaaaaaacaaaaaagaagataaagaatcagtgagtcagatttggtaccagctactccgttgactccctggcccgcttccctgaaaacccctttctgtactggtttctcacttccctggggactcaggagcacaccctcctacgtttcccctttcccttaatcccggttcccaataaccccagtgctgtccatacctggcagagacagacagaccaggagcaggcccaggggagcccggctcccacccgcgaggccctgcatcttgctcagctcccgcatctccccgggctccaagacagcaggctttatcccgttggtggggtgggggacagcagaaacaggctgggccagtggttgtggagacaatagatctgcccagtccaccctcattcttgattcggtctgtggcaacaggtgtcacttgaatgtcccagaggagctgggtgtttcctcacctggctcctttccttgtcctccctgccccttcctcacccaggtgttctggtccacaggtcacctctagttgccagccctgccctggtttgtctctgcaccaagcctcaggatgccggtgccttcgaagtctctcagcattggcaacactcagcggtctgactcctttgataatctagatcattcactcgagcatcccttgctcatagatccccacatctttccctgaatgctgaagtcctggggtgcaaaagctcccccatctgaggtgctgctagatgaagcccttagtctgaagaaacgggtcactcccctgcccccctcccgccttataacatgatatattaatgctcccttgctcctgtaacagcccaccagctaacgattcccaacacatattatattatattgggggtttattttctctttgtgttgttttgtttcatttgcttgttcgtttcctattttgtctgatttctttgggggtggagttgggatgggtgtagctggacagagagtctcactatgagactgttctcaaacttaccgtccccctgccgcggcctctgcccaagtgctgggatgacagacctgtgctgtcaaagctcccctgtaatcaagcttgtaaaagattttaaaaccgttctttagattgcatttattttgttattttataggtatgagtgcatgcattcgtgtgtaccacacatgtgcctggtatctttgaaggtcagaagggggcttctgatcccctgggactaaagttatagacattagtgaaccatcatgtgggttctgagagttgaatctagatcctctggaagagcaactaattctctagcccttattttattccttttggtttttgtttgtttgtttttattttttgtcttttatttcctgagacaggtttttctctgtgtagaccaggctgtcctcgaactcataaagatccacctgcctctgcctcctgagtactggaattaaaggcaagcgacaccaccacccagcttcttattttattcttaattatgtacatgcatgtgtgcacctgtgtggagagctgtgcctgtgagtgtaatgcccagagaggccaggagagggtgtcagactcctagagcctgaggtcagggctgggaacccaaatctggtcctctcaagagcagccagtgctcttaaccactgagccatctctccagccctgatatcattttttagaacaaaagtctgaaacaggtctttctgagttaaaatcaagggacctgagggactgactcctgttagttgctctagagagactccacttctggctttttccagtttccagggccacctgtgtttcccccaccttccaagtctcttcccacactgtatcatctggcttcctcctctgcctcccatgcccacgttttaaacactgtgtttacactggacccacccagataatcctggataatccctttatggtaaggtcaaatgactaataacctgtttccctttgccgagtaacctaacatatttataaattccaaggattaggatggtgacacctttggtggtgttggggtggaggcaccattctgcctagtgcaggtggtcagacgtatccaaagactataagaaacgggggctggaaagatgacttggaggttaagagcactggctgctcttccagaggtcctgtgctcaattcccagcaaccacatggtggctcacagccatctgtgtaatgagttctggtgtgatcttgtgccctcttgtggcctgcaggcatatatgcagacagaacactgcatacaaaataaagtctacaaagctaaaaaaagaaaagaaaagaaaagaaacagggcggtggggggggggctggagagatggctcagaggttaagagcactgactgctcttccagaggtcttgagttcaattcccagcaaccacatggtggctcacaaccattcgttatgagatctggtgccctcttctgatgtgcagatatgcattgaagcagaatgttgtatacataattaataaataaataaaatctttaaaaaaaagaaaaagaaaaaaaacaggctgggaagatggctcagcagttaagggtaattgttgcttttgcagatgactaggttttggtttccatcgcgcctatgtcagttaacaacctccttaactccagttccatgagatctgatgccctcttctggtgtctatggtcatcaggcatgcacatggtgcatatgcacacacacaggaaaaccactcatacaatccattataaatctagaaaagggggagggatataagaaacactcattgtcagtggtgtaccctagcactcacagagaaggacatctaaatgctgcagtcaaatgtcagctgactactaggcgatgaccattatctgccaagctggtccctgataattgactactgctgccccatattccagaagggtatggcatgggcctcattgcactggggtgatgggagctcatgagtgattcgactagttttaaatgtagatgctatggtttgcatgtgtttttttgtttgtttgtttgtttgtttgtttgtttgtttcgagacagggtttctctgtgtagctttggagcctatcctggcactcgctctggagaccaggctggcctcaaactcacagagatccgcctgcctatgcctcccaagtgctgggattaaaggcccggctcgtttgaatgttttgagggtgcccctcaccagtctgcagtgtggggagattgagacatgagacctttaagaggtggggtctggtgggagacaagagggagatgctcttggaggagtgagccttgttgtctctgatggcctgagggctatagtttcaactctgtggaggttcacaaattcaagtccaacgtgggctacagagtgaggtcaagaccaccttgggcagcttagtgaccctggctcaaaagaaaaaggttaaaaggggagagatgggggctggggtgatggccctagccttaggacatcttcctgttcttgaagaggaccagagtttggttccaagcacccacatggagaggcccacaaccacctgtaacttcggctcttggagatccaaccccctcttccagtcccctcaggtgcctggacttataatgtgctcacatacacacacacacacacacacacacacacacacacacagagagagagagagagagagagagagagagagagagagagacctatacatacagttaaaaaaaaatcttgcctggcactggtggcgcacacctttaaccccagcattcaggaggcagatgcaagtggatctctgtgagttcgaggccatcctggtctatacagcaagtttcaggacagccagggctacatagagaccctgtctggaaaaaaaaagacacaaacaaaaaaaaaaaaaaaaaaaaaaacataaaatgggggctggagagatggctagaggttaagaacattgggtactcctccagtggtcctgagttcaattcccagcaacgacatggtagctcacaaccatctgtaatgagatatggtgccctcttctggacatcagagatacatgcaggcagaacactgcattcataataaataaaaattaaaagaaaaaaagaaaagaagcagggacctatgcactaaattgacttctagcgttacccatttccaggtctcaggtgttttattatagcaacagaaagtgaactaaatatattggagggactgggggtgtggctcagtcactagagtgcctggctgccatgcatggtgcccattcctgcaccacataaaactgtacacgggggttcgcacctgtaatctcaacataggaggtagaggcaggagattaggagttcaaggtcatctgtggtgtcctaattagggtttctattgctgtgatgaaacactgttcgtgaccaaagcaatttggggaagacagggtttatttggcttacacttccacagcactgttcgtcattgaacagagtcacgacaggaacacatagggcaggaaccaggaggcaggagctgatgcagaggccatggagggtggtgtttactgtcttgctccacatggtttgctcagcctgccttcttattgaacgcaggaccaccagcccagggatgggactacccacaatgccctgggccctcctcagtaaatcaccaattaagaaaatgccttacaggtttgcctccgatctgatgttatggaggcattttctcaattaggctctctcctctctgatgactctaacttgtgtcaaactgacataaaactaaccagggcactcgatttcatagggggttcaaggacaggctgagctacgtcaaatcttgtctcaaaaataaaaataatatatacgtatattaggagcttttataataaaaagggttttattgttttgaaatactagaatactagaaattgaacccaagtcctcacagttgcccagcgagcactctgacactaaactactctgagaaataagttctgacttaagttcacttgagctcactctgtatcccgggcaggcctgcttcaggcttccaaatagctggggttgcaggcctatgccaccaggcacagttgataaaaagcatttaatttcctttttaatctttaaaacttttattatattcatgtatggtgtgtgtatggacatgtgtgtgctgcagctgtcctggcactcactcttttagactaggctggtctcgaactcacagagatctgcctgcctctgcctccccgagtgctgggattaaaggcttgcacacccgacaaacttttttttaagttcagttgtttgttttacttttatgtgcattggtgtaagagagtttaatcttggaatgacatacagttgttagttgccatgtgggtactgggatttgaaccctggtcctctggaagagcagtcagtgcccttaaccattgagccatctctccatgactcctctgtaatgaagaatcaggactgcctgcgattctgctttgtcccggcagatactgaaggctggcttagctcctccccagggcgtctatcatcgccggttcattgagaaccctgtggttctgcacttgaagttcagcctgcgtggactcaacacccgctttctccttcctgaaagaaggggagtgggtccggcactagggcagcaacaggttgcctcttaaaatctttgagagccttgtgcatggaaagagggacacccacgctcatctgtccttcctgggctagcctctgccacagctctctcaccacagcagactcggggtgaggaggtggacagcaccctgttggctctgacagtcacagaaccgtgttaagtaggccagtgagtcagtcaccaggctatgaagttgtcttactctccccgcccccagctcccagaacgcccaggctcctgctcagtctccaggaatctgcctgggctggtccagcgtcccagaaactcaagatcgactttagggactcccacggaggacggtgtttagaaggtgaggcacactaatggaggagaagccagggtgggagaaaagaaaacaatgaggctttttggatggaagggaggtcgggagtggggggctccggtgtgagtgggaacggatttcttggagctgagaagcgagactgtagagcggaagaatccggacaccgggcaactctgccatcagttcaatggatatttattgttttccttcttcgtggaaagaggtgtaagatggaaaacactgggtcaaattagaaaggggggggggggggggcatgggccctctagaggtacaggaggtgtactacccaggtattaaagaggagacctgggactccaaaaaaggcaaaaagtctgcacaaagttcaccaagtttattgagccctgtccaggatcccgagggagccaggagtctgtgccaggctctaccgatgccctggggtccacacgcacagggcaacccctgtggtaaccaaacatgggctgaggtggagagcaggggtggcaccggtgtgttggaaacgggtctggtaggctgtggtgagtcgtgatgggtggtagcgaggtcggtgagcgtggtggtggaccggattccgccttatttggcaaatgcgcagaggcacggttgacacgtcccggcatcaagaacctgaataagtgagttgtaaggtgggtgatcacgcagagagggcaccacagcagaacggggcggaagcaccattgcagatgctgaacaaaagtgacaagagcctcccggacggagggcaggaaacccccgaacgtcttccataggcgtgggtgactttaaggcttgtcaagtggctgtcccggcggcagaaagacttgagggtctgctaactgggggcccagaggcttcacttgagccagaatgtcccggatggaacggcagggcatcctcccggggctgttgaggccacagggcttagcaatcacggtggtgacacgctgcggagagccgttcagacctccgttcagcgcggaggaggaagcggaaaggcaggggtagccggcggagatagacttgctgccgcagggctggaggacaattttgccagtggagagggaggagcttccgccaccgatggagatggagccggggcctggtggcgagcagggcccctggttagccccgccgcagggctggaaggaggtactgctggaagtgatctgaattctcgagccagagcaaggccccctagaaccgacgccacagggctggactccgccgttacccacgggctggaacacgacgcctgaggatgggtaggcgttggaactggaggagctgtagctggggataatgggattgctggagaagtacttgccctcagagaccgggggcccggctgcaaaagagggcgcccctggagagcccttgacagggttgtccttggtgaagtagcccacggggtagattttacccccactgtaggtcatgcctggggctaggtaactgttggcagagccacccaccacctcgtacccgccgtagggtttctggacagaggtgatgggaggacagggcttgcccgaggggccaccgttgctacagggcatgccttgaaaccctccagggccaccagagccatgttgctccaccaccaccactaccggcctctgcccacccgatacggtgtgggagttagagatgtagggccccgagtgtgtgatgacgggacccccactgcagggagagtcgggcacgttggagctacagggagggtgattggagacggtgttagacaccccagagctgtgggaagagtaagagcctccagactggaaggagcctgatgtctggcgggaagaattgtcatcggttggtagagcggagccatttcctggtccctcccggctgcttcctgagcttccagactgagaactgctgcttacccatctggaactgctgcttcccgactgggagctgctgcttcctgtctgagagccgctgcttcctgactgggagttgctgcttcctgactgaaatccactgtttcctgactgagagccgctgcttcctgactgaaatccgctgcttcctgagtggaaggagccagacccagaggaataggagatctgggaagaccctgttcctggtttaaatatcagggattttgaagatcctccctgggagctgctggatcccccatggctgctgatgctgctggagccggtctttccaatgagacaagggtcgttgagggaggtgatcctggtggggtccttacatgggtctgagagggtcccaatgctcttagccaaggttcctgagagagaaagcagaggtctgtaaggactagattggaacaggggcttccccgccacccctttagccccattccggagtctccaaagaggaacccgggtagaacagaagtagaaaaaggaagaattgttactgtctgcgaagaaaatgaaggtgacagaatcaggaggtgtcgttgttctagcagtggaggttgagtgaggaggtcagatgctaaaactctgaagtggtaggcattgaaggagtacccttcagatggggtgggggcggaaacgaataggtcagaaacatgggggagggggatgctgaagctctggggtagagtagaccatagaaccaaacagaagaacgtgaaaggtaaagcaagggttgggggcatagtgttggcttaacatgcacagggacataggtttgacacgcccccattaaccatcaaaacagggggagggtgtgctgagacaggaaggaaacataggagcccaggaagagagaaagctaatgcaaaggtaccggcttacagaagaggagcgcactccatagccaacgtccattgcctgccagctccctagggagagcccagactgggtaagggggggttagaagactccctgctacctgcccctgctctggccatgccggcaaacctgggtgggagccaggatgtgggggcactcacctgttgcttcagaacctgccggtaccagtgtgacaggacaccgcaccctgaaccacccctgccgctgctgtcccagcccagggacgggacatgaaaccctcctctccatggcctccctctctccccacccagccttcccgtgcacctgctgccccagtctgccccacatctgactccggctgcccttggaccatctttagtcctgatcccacctctatctccaccgagggactctcagctcctaaccccatgctcctcttgcctcagtctgtccccacggctctcgcctcaatgtcttctgctcaccccagctccttcagagcgtacatcggcacgtgactaaccttctctggtttatatattcaaaggggcaaagcgtaccatgccctccccgctgagccaccgggaaggccatataatagcatctctctaggaaacatgtccaaaagcagcgagctagacatcacaggtcataatcgatactcatgctggagtggccagtctgcgatcacctgcagtgtccccaacctcatctcaaaaagaaaagcttggtgtaccctgcaacaaaccccctctgccacagtcccttcacccctcctcacaggacacaagccacccagcctgggctcggaagccaggacgccctgcttctaactgcaatctgcagacagtttcctgtcccctcaggcctcctggaccctgagaagcagagtggggatggcaaatctatcacacagacctcaaaaatgctcatgtatttaaagtgctagctacagtctagcatttaacaaggccctaagtggagcatgcctgtagttgctttcccaccatcctagctgtcaggaggctgagtttgaagctaggctgggctacaaagcaagaccttgtcaaaaaaaaaaggaaagagggccaagggtgccgtagatcagttagcaagcatgcatgcgtgtagcctggggcttagctcccagcacctctgtaaaaataaacacataaataaataaataaataaataaataaatgcgaattgactgacacatctacaatgcttgtaaaaagcggctctgaacgtggtagcaactgttgtttctataaaatagccagatcgtatcttctagtggggctaccaccactcatatagtcatctggaactcctgaagctgtgttgccacgtgcgttatttaatttggtacagagactggggctagaagatattaacctcatttctaacaagctcagaacaattacataggacttggagggtggctgggaggcagagtgcctgcctgctcagccactgtggagcaaagcaaaaataattccctgtgcagtgaccacaggaaggtggccaggcaaggatggggagcagtcccggatagaaaggtcagattctagagcctgtgcccctctcctgggccctgtgctgcaggcactggacgcccccagcctctccaacctagggcctgtgtcccacactgtccctctcccaaggccccagactcctacctggaagaatgagagtggccatcagcaatgccatcagcccgtgccctcccacacgccccatcccgggtgcccgagaggagttcattgtgcacggtgtggcctcctgactgacagaaacccatggacaccgggacctttatgctggggctggacattccctgggcaggagtcactgtggggaggaggaggggtggagagggaggctgcctgagggaagttggtgtggcaggagagactgaagcaatcggtgtcacatgtgcccactcagcaacaggggtggctgcagggacctgaggccgctgggcactagcctctaccctggatggccttccctggctcctcattgcctaacctagaaccaggtgctctgccccgggcccaccccgtcaagggtggccactatcacccagggacccagccaccctggtcctccctccctgcctgcccaagccccatcctcccagcgtccctccaccggaagaagagagggcatctcgactttccctcctgaccccaagaagcaccctgctcctgctcatccccaactcaccccacgatgcagggcagctctgctggggctcacattataacccccacctgcttgcttccttgaattctgtcactcagtcttctcctcctgcttcagatctgaagatccgccctcactctgggcccccccactgcccgagcaccggcccgccacctttaaagtgtcccatggacaagcaaacctttttcccttctcagaaatgacacccaccatactgaaaacctgggggctcctttctggaggctcttgggagagctggaggaggggtgggcagagattaccagagcttggactagggagaggcctgggttgggacccctgtcatagctgggcctcagtgactcaggggccactcacagtccctgtcccatggtagtgacccagactcaggaggatgagcaagaggccaacgaggctaattgggaaggtggtgaccaggtggcccattagcctgctcctcggcctagatgaacaaacagaaagcatctgagctttgtcctgaatgggataagaagggccagtcagctgctgggtccctgagggaaggagggttagaaccctgggacccaccaagagggaggttgtttctcctgcactaaggcactgcctcctgctgtaacccaggctccaccccagccagttgctcactaatattgtgggagtatcagtatcggagtttatcctcacttggtccctcctcccctcacccaaacttcttcacaagggcatctctgcccctccagtccttgggttggtccctccctttctcccgaccctgccctgagttctggcccttgtgatagcaaatactgcctgtgtaggctctgagactcccagctctccccaggccacacaggctacaaatgggactggtgtaacccactgaggttttgggcttttgtttgttttatttaagttcaattaggtccaaacaaccatgtgcagctgcaggtggccaccatctagttcttcacttcctgctggtgcctagagctggggctggaaagagaaaaagtccagggagccctgcagacctcagtgaccaaagcacaagccctgagaggggcggtggaccaggacaacaaaacaactgtggctttggaactgcctgaccctggggctttaatcaatttaccaaccctctctgaactgtgatttctttctttacctctaaagtgggagacgggtgctcaggacactgaaggtggaactcagggacttacacacgctgggctgttggtcaagtgtgatgtggcacccaggttacttctctctctactgggactgtttctgtacttttctatttttttaaagatttatttatttatttaatgtatatgagcgcttttcctgatgtatgacattatgaccaaagaggacatcagatcccactatagatggttgtgagccaccacgtggtgatgggatttgaactcagaacctccagaagaacgaccagtgctcttaactgctgagccatctctccagcctattcctgtacttttttcttgtttaattttatgtgtatgtgtgtttggcccacatgtgtgtaagtacaacccatgtgtgtaattcttgaagaggccagaagagagcaattggatccccctggaactggagttacagatggttattagcctccatggttggtgctgggactcaaacccaggtcctctggaagagaagttagtgctcttaactgctgagacatcgctctagccccctgggaatattttaaatattacctgctttcaaaggtttgtaaagatcaaacaggaaattaccaaaaaaagagtaaattaaatgggaccagggtgtggtcccctgcaggtggctcagtggccggagttcctagtcgctctcacctatgaattccctttggaaaggcaagccaaacattcaccctgagtcctcacaccgagacagaatagtggaactgcagtgagtgcctccccaacccctccctagactctcaggccccagctaggaccaggggaaggagtccagctaaggcagggcaaacagtagcagggacaagacaagggaaaggagcctttgtggtctgagaatgtgggcatccccagatgggtggggagaaaacagaactctttccagtatcacttccccggagcaccagagtaggcaccctctgtctgtcttgtttcttctacacattcctccctgctgctgtcagaccttggccaagacagccgggctggaggaggcacagtctctctcggcctcccgccagcttccagccacccacacggtcacgggtcacgttcctcacctggcctctctcctcctgtgttctctgtccaccctttcccatcccccactgcccatatctgggacctagaagctccagtctgttctcacagaaactctgcctgtccctctttgcctacagtttccctccctactgtacccattacccaccacctgaaaattaatgcatggaaggcgctggggagatggctccgccgttaagaacactggctgctcttccagaggacccgggttagattcccagcaaccacatgacagctcacaactgtttataaataacttttgatgtattatgttgttaggactgtcctgctttactgtttatctcttactgggtctaattcatgagttagtctgtgtatataatacacatcatagtctgtgtatacagcatgcattacaactcagagaggatctggtgctacctgggcatcattaggctcttagattgtgccccctgcagagaaaggggctgctataccctgccacatctctccgggtcaccattaacctttcaacctatcgatgggcgttggtggcgcacacctttaatcccagcactcaggaggcagaaacaggtggatctctgtgagttcgaggccagcctggtctacaaagtgagttccaggacagccagggctacacagagaaatgctgtctcaaaacaaaaacaaaaacaaaacaacaacaaaaaaacctttgaacgtatcaactcaggcagcaaaaccctgaagccagaggggctcaggagtggacacaaggggagttggctgatgtctgcatagcccaggtaacctctggggggtgctcactgtggccatgggagagctgggctctatatcagagagtgagtgcccagtgtaacacactgatggggcgagaactgtgggtgaatcagagcaactccccccccaaaggaaacccaagttcaaaggatgggcctttgacaggcaggaagcccaggttgtcacaagaatgggagaacctcgaggccagcctggtctctagagggagttccaggacagccaaggctacacagacaaaccctgcgtggaaaaacaacagacatacaaacaaaaagaatgggagaactctatacattccagcagccctggccacagggagatgtggccgggaacgacctggccaaagaggaggctgaggtgaggtggcctcttcactggccgtccactaccagccttggggcagaatagcagaaatcctagtataagaattccatagagggggtcttagtcagcgaggggcttaggctggggagaaggaaatggacacagaggaaaggctgaggggctatcggtctaaggctcatctgaggctgcccacgggctcctcccttcgagttccagtcagagtcgtccctcttctgccctctctttctccatcacccatcggcccaggtggattcatctctagtcacataccttcctctccctccagtagaaggtgacactcctggcccactcccactgggcatgtcctccgagctgtttttcctgtcgtgtggatggctggccctgagtcacccacagcctttacttggtggctctctaggccaatagcacaaagggacaggatttatctgcgtgtagagttcttaccagtctaggctccctgtgacaggaaaatgactctagggtctttatctcttgtcagtcctccctcccgggagcactctgccagcattggcagtttctgccccatggctgacagccagccttcttcattctgtcctcacacagaccaaccctgcaacatgttgtctaggcttccaaacagggaatgtttcccttggacctctgacttggtgacagtgtgtgacatgtgtgtgtccctgagttcccaacacacagccttgggaggcacatggtgatatggcgtgtgcgtgtgcgtgtgcgtgtgcgtgtgtgtgtgtgtgtgtgtgtgcgtgtgcgtgtgcgtgtgcgtgtgcgtgtgcgtgtgcgtgtgcgtgtgcgtgtgcgtgtgcgtgtgcgtgtgcgtgtgcgtgtgcgtgtgcgtgtgcgtgtgcgtgtgcgtgtgcgtgtgcgtgtgcgtgtgcgtgtgcgtgtgcgtgtgcgtgtgcgtgtgcgtgtgtgtgtgtgtgtgtgtgtgtgtgtgtgtgttgtgtatgtgtgtgtgtggtgtgtgtatgtgtgtgaggtgtgtgtgtgtgtgtgtgtgtgtgtggtatgtgtgtatggtgtgtgtgtggtgtgtgtgtcgtgtatgtgtgtgtggtgtgtgtggtgtggtgtggtgtgtgtgtgtgaggagtgtgtgtgtgtgtgtgtcgtgtatgtgtgtgtgtggtgtgtgaggtgtgtgtgtgtgtgtgttgtgtatgtgtgtgtgaggtgtgtgtgtgtgtatgtgtgtgtgaatgtatgtgttgtggtgtgtgtatggtgtggtgtgtgtggtgtgtgtgtatggtgtgtgtgttgtgtgtgtgtgtgtgtgtgtgtgtgtgtgtgtgtggtgtgtgtgtatggtgtgtgtggtgtggtgtgtgtgtgtgtgttatacatgttcgtgtgggtgtgttcatacatgcacatggaagccagatgtctacattgagtgtcttcatcaatcacctttaaaattttttttttcctttttgagtcaaggtcgctcagtcgcctgcagctcactaattggccagactggctggcttcctccacccacacccaccccccacccccgacacacacacaccacacacacacaccacacacacacacacacacacacacacctcacacacgtagatcctagggatccagacacagatcctcatgcttgcccagcaagcacttggctgcctgagccaaatctgcagcccagtagctggtgatgtgtttttgattgtgggttgtgtccaagccacatggcctcttgctgcttcctcaagaatacatggtacctctctctggatcttacaccctacccttctccccttcctgacacatgcaaagcccccaggggttctgagaaggacttccagcgccaccccccactcatccctgtgctggagaacagagagcaggtacccagacctagacactgactccatgctggcttcgtctgtgccaccctcattcctcccaggtgactgactcccctaagctactcttctccctggtggattctattttctccccaaggaatgcagcgtgtctctactggcacagcaatgctcacgtggctgtggtgaggaagtacaggctttcccctggaccatgaaacggtcagatgctgggctggggtagggcagggcccactattgtaaaccccaggggctcttgtcctctccccgtgtaacatgttgtccctggctgagactctatcctgtgctcctccctcaggaggtctatcctgtgctcctccctcaggaggtctatcctgcgctcctccctcaggaggtctatcctgccctcctccctcaggaggtctatcctgtgctcctccctcaggaggtctatcctgtgctcctccctcaggaggtctatcctgtgctcctccctcaggaggtctatcctgtgctcctccctcaggaggtctatcctgtgctcctccctctggaggtctatcctgcgctcctccctcaggaggtctatcctgtgctcctccctctggaggtctatcctgcgctcctccctcaggaggtctatcctgtgctcctccctctggaggtctatcctgcgctcctccctcaggaggtctatcctgtgcagcccactgacctctccaggggactcagggagcacggtgaggactgggtcagagtcaggtgcatctttgggtttgaatccttaagtagaaagaattggcgagtgggggccccacacaccaggcgaccnnnnnnnnnnnnnnnnnnnnnnnnnnnnnnnnnnnnnnnnnnnnncagcacagagtcacctgaaggacagtcacgttccctgagctcagtgcatggtcctatttaagtgacatctaatttagccaccactcctcttgaaagagggtgtgattagctctcaggataacaaaatgtttttctcttgtctgctttgtggaacaagtgccggggaaccctgtgctcatgaggaaggctcaattagcgtgcctattaaactcctccattgtgcccagtagtgcttgttattggtcacccgaatcggagatccaactccctctccagccaggacagactcagagacgggagggagggtcatagcacagtctgcacgtggtttcatggcctccagggaggctggaaggactggtaccaagagggacttccaggcctggtgtggcatccccgtgggccatctcctcccagctcttctggtgtgttctctctggggtctggtaggtcggctcgcacaccaggtaagcggtaatgggactgtttgctgtagggaccgccctcagggctgcacaaccccaccagggagcaaagccagttcttagacgctgcaacccccaaataccctcacaggcaggtctccaggttctctgtgactcaagcaggtggagaattcccttctggagtcacaagcccaagtttagaacatcagcacgacgcccactccccgaccgggacttcaccccggatcactgacctgtactctgctaacacacagagctactgcttctcccggatgctcccatgatgcctccatccctaggtccagtctttttttgtcatctgtcatctcctcagggagggtatcccacgactttttttacttaaaaatacaaaacgtcgaggcttgaaagatgtctcaactccagccctcctacagtgagatagaaggtagagatggagatgcactcactcacgggcttgctggctagacagccgatagtaagctgccgtgccccaacaaggtgaaaggagagggagaggagaactgtctcctgaaagttaccttctgacctccacacacgcgttctgtggcacactcataattagtaattttgaaagtatgagccgggcgatggtggcgcacgcctttagtcccagcactcgggaagcagaggtaggcagatctctgtgagttcgaggccagcctggtctacaagagtgagttccaggacagcctctaaagccacatagaaaccctgtctcgaaaaaccaaaaaaaaaaagaaaagaaaagaaagaaagaaagaaagaaagccaccccccactcatccctgtgctggagaacagagagcaggcaagggctaagaaactctagggttccctctggcggcaggtacaggaacagcaacgtaggagaaatgagttcgccgagaagcctggcctgggtggtgaaggctgcaatcccagcacctgtgaggggtgttaggataaagctcatgggggacctcggcggattccatggcaggctaggtaaccgaggctggagaagttttattagaaaggggagggtggggaagggaagagaaaagaggtgaagagacacagagacagagagaggaccgaagagggagacaggaaaagtcctgtctgccccagaggaaccgcggggaagagagcaggaaagagcataagagggccgggtctgtcttttaaaggcatcctttgcacctgcgtgcagactatgcaatcatggagccctgggctgactggggtattgcctgagtgcgttctgccaggtgacaggtgccggccagcttaatttctgaatccttacgagacggagtcacgaagatcagaaattcaaggtcatcatcatacagcaacttcaagtgcaacctgggctgtgtgagaccgcatctgaaaacacagaatgaaaagcactaggtgtggtggttgagcaggaggactggctgcaagttcaaggccagcctgggctacatagtaaattccgggcaaggcagggttgcaccgtgaaatcctgtctctaaataaataaataaatagttgggtgctgtggtgtatgcttgcagactctagacccagttactcaggggctaagtgaagctggagtttcgagacagggtttctctgtagctttggaggctgtcctggaactcactctgtagaccaggctggtctcgaactcacagagatccgcctgcctccacctcttgagtattaaactaaaagcgtgcaccaccacttcctttggtcctggggttttgagactaccctaagcaacagaagagaatcttcccttaacaacagcaatagcagacaggaagaagtcacagatacggatgtgcctcagtggtagagggctcgaccctcctagcacataggaagctctgggttcaatgcctcgtaccgggatggtagtgcgtgagcgtgaacacacacacacacacagagacacactcagacgcacacacccagagacacacacagacacagacacacacatacagatatacagagacacacacagacacatacacacccagatacacacacacagacacatacacacatacagacacacacagacacacacatacacagacatacacattacagatatacagagacacacacagacacacacacacacccagatacacacacacagacacatacacacatacacacagacacacacacatagacacacacatacacatacccagagacacacacatacacacatacacacacccagagacacacacagacacagacacacacatacagatatacagagacacacacagacacacacacacccagatacacacacacagacacatacacacatacacacagacacacacacatagacacacacatacacatacccagagacacacacatacacacatacacacacccagagacacacacagacacagacacacacatacagatatacagagacagtctgcacgtggtttcatggcctccagggaggctggaaggactggtaccaagagggacttccaggcctggtgtggcatccccgtgggccatctcctcccagctcttctggtgtgttctctctggggtctggtaggtcggctcgcacaccaggtaagcggtaatgggactgtttgctgtagggaccgccctcagggctgcacaaccccaccagggagcaaagccagttcttagacgctgcaacccccaaataccctcacaggcaggtctccaggttctctgtgactcaagcaggtggagaattcccttctggagtcacaagcccaagtttagaacatcagcacgacgcccactccccgaccgggacttcaccccggatcactgacctgtactctgctaacacacagagctactgcttctcccggatgctcccatgatgcctccatccctaggtccagtctttttttgtcatctgtcatctcctcagggagggtatcccacgactttttttacttaaaaatacaaaacgtcgaggcttgaaagatgtctcaactccagccctcctacagtgagatagaaggtagagatggagatgcactcactcacgggcttgctggctagacagccgatagtaagctgccgtgccccaacaaggtgaaaggagaggnnnnnnnnnnnnnnnnnnnnnnnnnnnnnnnnnnnnnnnnnnnnnnnnnnnnnnnnnnnnnnnnnnnnacacacacacacacccagatacacacacacacacacacacacacacacgtatacactcagatacatgcacatgcactcacacacagacacacacacacccagaatcacacacacagacatacacatacagacacacacacacagacacacacatacacagacacacacatacagatatacagagacacacacagatacacacacacccagatacacacacacagatacacacacccagacacatacacacacacacacacacacacagctgtgaccacagcactcaggaggtggaggcaggaggatcaggcttttgaagacatcttagctacgtggagaattcaaagccagcctgaggccaaatgagagcccatctcaaatagtaaacatcatgagtgtcatgatgggtgacacttaaggtgcagctcaagggtgggacatgtaactagtgtgtcgagtatgaggtcctgagaatcagccccaggactgaaaaagagagagagaaaagaaaaaagaggggcaaagcaagagaggctgagctcacggcaaagcaggtctgtgtattcaggagaatttgaggatagcgctggcagacacttggggctcccctctgacttaactggaaaggtcctattgccaccatgattgacatgtttgttttttccctggcacacagagccccttgagggcagggaggacagcaacaagctgtacccgcacccctcatgacagaagctcagtaaatgctgaatgtgtggaaacaggaatgagtggttagaggctccctgcctgagatctccccaggcaggacaatgcgcctcactgtcctgaggaggatgttctcccgctctcccgcctggagtctgtacctcggctccctcaagtgctcagcttctattattagactgtcccacgaaactagcccagctctttcctggccaagcatttattgactgtcgtgtccacctagatattgttatgcaaaactgccattctgtttcatcatgtaattccatgactccctgttgacacaagagtgcctatgcccactgcaggcacgctctgggcagagaggaagtgacaatggactcctaaccacccagtcccactcagtctcctcccagctagtaaaacatgccgtgtgtcaacgcaaatacatactattaataggaactgaaacccccggttacctcatcccatcgtcccactggtccacctgctgcatccagacaagggtgagctggagccaggagccctgcactgcctgggctgcactggcagcgtgtctcgagcaggtgaggtaactcttattgctcaatgtcttctcccccctacctcttccctttctctcttcctcttccctcccttcctttctctcttccttcctgccttccttttccttaatacaggacctcagtacattgcccaagctggtctcaaaccctcagtcctgcttcctcaggctcccaagcagctagaactacaggcaccacccacacccggcctcagcacagaatcctaacctttgaaatggggctaagaacttgctttgttgaacaacttttggctaagtgttgtggaccagaaaaaggatacaaagccagcaagccccaacctctgcttcagggatctattctgtttgctgttgttttctttctttttggcttttcagacaaggtttctctgtgtagccctggctgtcctggcactcgctctggagaccaggctggcctggaactcacagagatccacctgcctctgcctcccgggtgctgggattaaaggtgtgcgtcaccaccgcccagctggtgctgcacacttttgatcccagcacttgggaggcagaggcaggcagatctctgtgagttcgagaccagcctggtctacaagagagagttccaggacagcctccaaagccacagagaaaccctgtctcgaaaaaccaaaaaaaaaaaaaaaaaacgtgtgcagcaccaggagagggaaagacatagaaaacagagcaacagaatcaatgtggatcatgagagctctcgctccttaactgggctacaccagggcctgcagggctagttcattcctttaatttcccacctttgttaagaggttagtattggtttttatttccccaatgggctgagaatgtccctcagtgaaaaatcttccctggaaagtctgagggtagggaaattggcacattgtaatctcagtacttgcaaaacctggagttccaggatagcctgggctacagaagtccttgcttaagaaaaaaaaaatagtaattaagaggaaaaaaagaggttgaggaggaggctgggactgtaactctgacagtagatttgctggcctgtgtaactcagatggtagactcgatcgcctgacatacacaaagccctgggctagattcttgccatggtagtgaccacatgtaacactaaggttctggagatggaagaaagagattcagaaattcgaacagggaagaaaggcaggacttactgacgcatgtctttagtcccagcccttgggaggcagaggcaggtggatctctgtgagtttgaggccagcctggtctacatagcaattccaggacagccagggctatgtagacagaacttgtctccagaaaaaaaaaagaaataaagaaagaattaaaagaagaatgaataaacagaagagagaggaggggaaaggggggagagaggagaccctggccttagcatcctcagcctacccaacagtgtctgtccctcaggttacaaagacttcccagctaccatttcaatccattctcttgccatttgttggtggattcagctattcctaagatatgaattatggggctggagagatggctcagcggttaagagcactgactgctcttccagaggtcctgagttccattcctagcgcctgtgtatggtggctcacaacgggaggctcacaaccctctgtaacttcagttccagggatcttaagccccctgccgccccccccatcaggaatgtataggatatgcaaacctacatgcaaacaaaatatccactcatccatacatacacataaaaataaatctttttaaaaagcatgcataagggtgcaggacacctcagcgccaggcgctcccaaatgggtgtagtgtagtagtagtcaaaactagagttgttagggcagcatcaaccagacttcactgtctcctgtgtgatctcaggagtcactgtcttctcccaggccctacctttctctctcacccaggactgtgtcccctcggccctgccaggacagcaacccgtgtcaggtgagagcacagaatgtggggcagcatctttgcttgcactgcgcatgcctgagcctctggcttgaactttggagaccctcctactccggccacacttgctccagggtctctcatggcttcctgctgtgactattccacctacctcactgtgactcccaggactgggctttggccctcacacagccatttagttgtcagttactaaggaatgcaaatcctgtctctcctggctccaagttcctgctggtggaatcacgttttaaatccttttttgttttgttttttgtttttcaagacaggtttttgttttaatttttttgttttttgtttttctctttctttcctttttttttttttttgaaacagggtttctttctctgtctgtcctggaatttactctgtagaccaggctggccttgaactcagagatccgtctgcttctgcctcctgtgctgccactgcctggctcagcctgctttttttacacagcccagaatcacctgcccagggtggcaaagcccactgtggactgagccctcccacatcaattattcaccaagaaaatgtctcacagacttgcctacaggctaatctgatggaggcattttatcagtagagttttcctccttccagtttattttgagttgacaaaaacaaacaaacaaacaaacaaaaaacataactgaaatacgagtaattttttttttcctttttgagtcaaggtctcatgtagccttgaacctagctcttgatcctcctgccccagcctccctagtgttgggattacagatgtgagtgactatactctgtttagaggtgtaaaaattaaagattttaatgccaggagcttcaacttcttttagaatctcttcaaccccaagtctggtcagccactcactggactaacaccaggtggcagggatctatgaatctgtcctttgccctttgaactcgaatgctcccttaatcccaacactgaagccggctgtcccagctagggtttctattgctgagatgaaacaccgtgaacaaaagcaagctggggaggaaagggtttatttgatccttattggtccatcattgaaggaagtcaggaacctggaggcagaagctgaagcagaggccattgaggggagctgcttactggcttgctgtgcctgcgttcttatagaacccaggatcaccagcccaggggtggcatcactcgaaaccagctaggacctcccctgtcaaacactaattaagaaaatgccttggccgagcgttggtggtgcacgcctttaatcccagcactcaggaggcagaggcaggtggatctctgtgagtttgaggccagcctggtctccagagcgagtgccaggacagcctccaaagctacacagagaaatcctgtcnnnnnnnnnnnnnnnnnaaaaaaaaaaaaaaaaaaagaaaagaaaagaaagaaaatgccttgcagctggacctcatggaggcattttctcagatgaggtatcaagttgaaataaaaatacccagcacacaggcagatctctaattggaggccagactgggccactaagtgagactctacctcaaaagtggggcggggcaggcatggtagcacacgccttctttaaacccagcactagggaggcagaggcaggtgtatgtatgtaaatcaaggccagcctggtctacaaagcaagttccaggacagttgaggctacataatagagacaaaacaaaacaaaaaagtcacataaaccttttgaagatagaagataagatataaaccctgagcctttcatttccatctgcaagccttttaaattttatttttatatgtatgagtgcttagcctgcatgcatgcatgcatatctttgcacgcagtgcccacagagagcagaagagggcgtcagaaaacctgaacctacaggcagctgcagtcaccatgtaggtgctgggaatgaaccctaatccctctgcaagagcagccggtgctcataatcgctgagccatccctccagccctgtgtgcaagcctcttagccggtatgaaatcgccttttccctttttttttagcttcccttcttcccatcccctagaattttctcctagtgaaacgtttttcactgtatttctttttccctccttattctcctctcatacaatgcattccgtctgcagtttcccctcccagttcagctcacacacacacacccctctcccctagttccatcctcttctgtttgccctcagagaagagcaggcctcccagggatgtcaacccaccacgggataacaagatgcaacaagactaggcgcaaaccctcatatcaaggctggatgaggcaacccgggaggaggaaaaggtcccacgagctggtgaaaaagaccccctcgcttccacaggactccaagccaacaaccataacacagatgcagaggacctagctcagacccacgcaggcaggttctgtggttgctgcttcggtctctgtgaggcctgcttagttgattctgtgcggtcaactcctctggctcccacaacagcttcttcccggtcttccacagggttccccgagctccaagggaagggactgggtggagttccccagtttgggcgctctctctctccacctaatgtttagctgtgggtcggtctctgcatctgctcccatcggctgcttaggctacgcagaaacctcttctctttgtatttctttgtgttttctatctctgaggctctcatggatctccgactgtcctcaaactgtgtatgtggctgtggacggaacctagggccttgcatacgcttggcaagccctctaccaattgagccactccccgcccccccttttttttgtttgagccagtgtttcatgtgtcccagatggcatctaacttgacgtgttgttgaggataaacttgaactgctgaactttgtcttcccttcccaggtgccaggcttaccacagccagttcataggactaatgggtattaaatagttattcagcacagaattcatattacaactatcataaaacaaatattaaagctaaaaatactgattagacactaaaaacaaaactttcagagaaagtgcatcttaaagccgggcggtggtggcacacacaggcggatcctcggtgagttctaagccagcctggtctaggaagtgagttccaggacagccagggccacacagagaaatctgtctcgggcgggggtgaaaagaagcagcagcaacctagactcagaagtacagaaaaaaaacctggcttttattttccctttgggagcgcaccatcctggtcaattgtcatgtcacagctgagaccaccaggtggcagtagggagcacagtgctcaggccctccctggaggtccaggtctagacaccctgggaagaggaagcaggaataggttgggtgaggtaggcgtgtgttttatgttattctgaccaagagaggcagaggggctgaacagggaccccgaggtgaaaaagcaggtatgcagaacacagacacctgaacacaatccaaccagggacttaggaagggagctacaaaagggaaaattgagattttaaggagcagcagaggaaagaggtgggtttgagtgtgcgctcaggaggctcaaattccctggggcgcctccctatctgtactcttcctggggtgggtcaaggtcaggctcctcttgcgatccgtggtccatctcaggggcaggtggccaggggttttctgggggctgggtgcctgctggccaggggtcatcgggcagaggagcgtgaggggcatcagtgctgggaggctctgggggccacacaccagcattgggcaggtctctccagggacggttggggcctggaggtggaggttcatcaaagataggaggtacccctggccacgggtcaccagggattggggggcccaggggcaatgctggggagtcctcctcttcttgggcttctgtgggtctgggagaggggtctccactgcctgagatgcctgtagaggagggaagaaaagcgatgcagtcacagagcactcctcacccagcctcagacccaaaggctgagcctcccttagaccagcacagcccgagctggccccaggatggacctccccaaagagcttccaatacatttcccgaatactgaagccatcttcacaagaaagccctgggctcatcgaggccccccacatgatcaagccttcaaatagctctgtccaacctaggttgggagaccccaccggaactaccccaaggctggtctgcacctatggtggtcttggccccatctctgttatatataaccagtcctcaacacagaccccccctccccccaaactcccgtcgcatccatgcacctgacctagcaacgtattcaggaccaagtccctgccggccttccctaagtatccccactatggcccgtccagaatccctttcccggagcttcccgctaatgcttgctgagcattatggctgtctaccggcccccagagtggggtgctctgagtctaggtgcttgagaacccgacaggctttatagtggaggagggagaggaggtggccagtctgtggggaggggccagccccgtgacgaggattccccatcagagtccgactggtcagacccgtttacagagcccgggacagcccttcagtcccccagcccaggtcatcagccaggtctccctatcagtgacccagaccccaggagaccccacccttgttttcatacctcctccttccacacccggcaggcagccgcgggtacccacctgtcatctccataatcacagggaaggccacctttcatccctgacagctattggaagccacaaaacgggggcaaactctgcgtggggaagcttgctaattacagggggaggcaggacgcctgggtcagctagcacccccgggctggcatcacagccctggggccccctcccccacttccctctggaccagggaggctgctctggcctgtctctttggctacaggaggacctcccaggcggtgacatctaaggaattccatggggagccacctgggtgactacaagccaggatatcctggttcctgaccccatgcagagaggggttgagtcaaccacaaaggctcgggaagacgcacccccacccacccatgtaatcgggtttcttcctccttagcatcagggccctgcgccctcctccccaacccctccatgagaactccgttccccctcacacacacacattattccccacctggtctttttggttactgcatcttcttcacttgaaagccctgttcccagagcactcgccctggctctggcctatctcactcagttattcttccttcctactcacacagattttttttttttaaatgtgaatgggtggggtttttaaaattttatttttattcatgtgcattggtgttttgccatgggtgttgagttggttccctggaactggagttagacaattgtgagcctccacaaggtgctgagaattgaacccaggtcctctggaagaacagccagtgttcttttttggagggagggcggttggagacatatattatctgtgtagctctagctgtcctgaaacttgctttgcagaccacactggctagaccaggctggccttaaactcagagatctgcctacctctgcctcctgagtgcctgggttgaaggcatgcgccagtgttcttcacgctggagccatctccccaacccatccaaaatccctttacaacacaatttggagcagctttggagtaaagtcctgttgcaagccctgttccctgctgagccctgagcctctgccctgagccccctgcccccatgccaccgtcacagtggccctgggctgggaaagtctctgtctgctctgagactcttcttgaatgtaccaggcatttgtcagcacccaaagaaaataattgctaaacaaaaagtgaaggtaaagaaaacttggtccaggtagccgtgacacatgccagcactcgggaggcagaggcgggtggatctctgtcatttccagccagcctggtctacacagcaagtttgagggcagccagggctacatagagaccctgtctgaagaaagaaaacttgagaggcagaggcaaataagatccctatgagttcaaggccagcctggtctacacacatggtgagctccagggcctcgtggagaccgtctcaaaagtcaaaacaaaaccaacaacccccccccccaaacctaggaacttctcaaaacatgtccggagcagttaggaagggggtgccactcaggggaagggtggggtgcttcccttcaccccacagcctcaggagctggcctcagggagaacctgtctcccagacacctccaaccaacagctccactacagccatctttattttttgcggaattcagccttggtggaaggaagctgggtaaccaaggcttgccgggaaacaggctggccgacatcgtcccaatccaaccatcctgggggatccggctccaggctggctctaggctggcttcaccgccgcccctggcagctccggctcagcagcagtctgacggggggcactgagtgtactgtttatcttctgggcatgtagcctcctctctggaaatggcctcgctcaggccttgcaggttttcgaacagggcagtcagggactctaacacagaaggtgttgcagggtaagaagagcaggctccgtgctgcccagggcactggtgtcgaggaaaggccaaaggcctttggggctcgacaggggcgtgtgggtgtaactacctttcgtacactccctgggcggtgaggccgctggacacccgtgctctggggatacctcaggctgagggctgaacctcacggttttcttgtcggttcccaggggaagcattgccaacagccgctgctgcttgtaacgggagaggagaccctcctgcctcagggtggcctgggaaggagagggtcagccgcaccgcacggggccacgcaaaccgcccccaccctcccctcagacacctctactcacccaccagctaccatgaccgcgctccctctgtcccctaccagcatgaggtttttgtccctctcgagctcctgcactctgcgggccacacgctgagcctcctccttccgggcctcatcctgaaggcgtctgagctcctggttccgctccttttcccgcgtggctctgtgctggatctggcgcaaggaaaccactgaggagatgggagtgggtcagcccggagcccaaaaggtgaggcctagttctcaactctggctctcggggtctcttccacacgctgagtgggctggtgccaggggatcctgggctctgtgaaccccaggtgccttcctcatctctgataccagttcctcaggcaagacctggacccccaggagctggagtcagagctcctgtagctcgctggtcctcctgtggtttgtgctgcagttgtttggagccaggcctcactgtatagcccacccaggctggccttaaaactatcctgctgtctcttactctcaagtgctgggctgctaggcaagtgccacccaccatgtgtgcctagggctcatggatcttaagacactggggtgtgtctgtggggtgtgcagctgaaccagcatgtctgcaacttacatgactcaaatgtctacatatgtaaccatgggtgcataggtgagagagaggggtgatgactgcgattacaccgactctcactcatccaagggttaagtttctgatgacagtggtgtccgctgaggggtaagtgacacaggcccaggagccagagaggtcactagctgtttcttgatctggcattagatgcagtgtgattgctaagtaagaattcatcattcacgccattcctcaatttcttcactgtagacatgcgcccggggtggggtgggattgacagccctaagtctctgccgctgctttcttcctggaagggccaagtcctccccagcagatctcaccggccttggcctgctccctccgcgcctcattcagcctcctctttgtgtctgagagctgttcccgaagccgagtttccacctcggccaccttctcctgcagagctgccgtgagggtacaaggcagtgtcagggggcacacacggccatgcacatgcctcgcagggccatgctcacacagccacactcacgctggcacgcaagcaccaccacgctcccacaccttgcccgtagatctgctgctgctgtgtcagctcctgccggaggttggcagcttcctctgtgctctcctgctgcccctggcgggccgactccagctgctgccccacgttgaccagggactcctgggcacgctgcagctcctgctccagctgctgggccacctcgttcagctgcaggcgctctgcctcccctaaggggaagtttttgtggtcacacatgatctcttctggcacctgagcctcagaccccaagtcttttccagcctcatctgtccatccgtccatccacccagacaagcctaccttgctcccgggcccggcccacctcctgctggatgatgtgggcactcagctgcagctcagcatccaagcggttccgttcttcccgaaggtgctccaactcaaggctcaggtcggcatccactgggggtgcgggtgggggcgggggacagctgggacagaaatgacaaaggagtcagaggaaattccctcagcagccacctgagcggcgcctccatccctccatggtcctctctgcgtcctggccaccaataccggattgccctcaatgtccacacaccctccacctctgtgtgcctgaacttcacctttgcaggcgcagctgagcaagggacacttttcgagccatcaaacctgaggaggaaaggcaaaggacaggaagatgggtatacacagacagaaggacagcaggagcacaggccaatgacagacagacagaaagacagctgaagcacagggcagtgacagacagaaggacagctggaacacagggcagtgacagacagacagaaagacagcaggagcacagatcagtgacggacagacagacagaaggacagctggagcacagggcagtgacagacagacagaaggacagcaagagcacagggcagagtgatcgttaccaagacaacagaggatagatgaggttagatctagggctgagaggcagggggccaggccagtggggacagacagaaggacagcaggagcacaggccagtgggacagctgcgacacacacccttaatggtgtggaccttccggatggcatagctgagtcggttgctgaggctgggaatccgggctacagtctggttcagcctggtcatggtgccatggatgctgtcctgagtgctgtaaagacacaggtcactcaccttccaccctcccctcacctctgaaggacccacagggtgtatgcacaggacacgcttgtcctatcctgttacatgagtggggaggtgggctgtaaagcaacaagaaaaagggggaacaaaagccaccaggagggacaagaccttagtggatcttgcaagtcaaccaagctccttagcagatcttttttttttttaagattttatttattaattatgtatacaacattctgcttccatgtatatctgcacaccagaagagggcaccagatctcataacggatggttgtgagccaccatgtggttgctgggaattgaactcaggacctctggaagagcagtcagtgctcttaacctctgagccatctctccagcccctccttagcagatctttaaaaatgcctgccagataaaaacatccagctgaagccaggcggtggtggcgcactcctttaatcccagtgctcagggcagaggcatgaggatctcttgagtctgagaccagcctggtccagtagtccccctgggggcaggaggtgcgtgcaatgctttgaatcagggcagtggctctttgaatctagtctgattctctgtgggttttaaagtttcatctttttttttttgtttgctttttgtttttcgagacagggtttctctgtggctttagagcctgtcctagaactagctcttgtacaccaggctggtctcgaactcacagagatccacctgcctctgcctcccaagtgctgggattaaaggtgtgcgccaccaacgcccggctaaagtttcatcttttttttcttttttctttctcttcaagtgctagggatggaagccagggattcctgaatgccaggcaagtgctccactgtgctatagactgtacaatttagatgctttccaaactaaacagggtgtaagagcacaggaaaggaggaagggacgggggaggtttggaccctccatgtcctatcactgagctgtgaagcccgggctccacctagctgccctacttagcttcaaaggctacccgacggaactgcaggaagcaggattccccagctccagacaggttaaattcacagcgggagacactgccaggcagagatgctccctcccgcctgaggcctgaggctcctcagggtcccagaggcttgggaagctttgccgccctgagagataccttttcatggcgctgaccacgaacttcagctgctcctcgacagagtctgtccgctgcttctgccgccgcctggcctcctgagcccgattcagctccatttgcagggtctgggaggatgccgttttgtgttcgtgttttctcttaagcctcctccctgttgtctggcccacagacccgcggcagccccagggtctccctcaccctccctccagtctctctctctctccagctcacagacccgcggcagcgcccagggtctccctcaccctccctccagtctctctctctccggcccacaccttgatgctcatgcgctccacctccagctccgccgctttgtcttgcagggcttgctgcaagatggcctgctcctggctctgggccatcacttgttcctggagctctgctacctggaagagcagagggagctgggcaggcaagtcgagagccaaagccgcgcggaacgccgggtttgaaggagaatcaaggagaccggcagaatctctgaagtggggctagagacactggctcggcggttatgaggcactggttgcttttgcagaggacctgagttcaattccctctaccctcgagatgggtgtgatggctcataaccgtttgttactccagttccagggtggccaacacattctgacttccatgagcacacagtacacatacatacacacggtcaaaacactcctacacacaaaataaaataaatacatccacagctctggttaccctggaactcactgtgtagaccaggttggcctcgaactcagcgatctgcctctccctaagtgctgagattaaaggcgtgtgccactacaaaaataaatgtataaataaataaataagccaggcagtggtggcacacacctgcctttaatcccagcacttggtaggcaggaataggtggatctctgagttcttttcttttctctctcttataaaatcttactttattttatgtgcattggtgttttgcctccatgtatgtctgtgtgaatgtgtcaggttgcctggaattggagttacagactttgggagctgtcgtgtgggtgctgggaattgaacccaggtcctctggaagagcatccagtgctcttaaccactgagccatctctccagccccagatctctgagtttgaggctagcctggtctacagagagaattctaggacagccagggctacatagtgaaaccctgtcttgaaaaacagaaaaaaaaaaaaaaaaaaaaggaaagcaagatgagcagtggtggtgtacccctttaatcccagcacttgggggcggggcagaggcaggagaatctctgagttcgagaccagtctggtctacagagtgagttccaggacagccagagctacacagagaaaccctgtcttgagaaaagagaaatcagcacagcacagcagtctgagggtgaggagctgctggagcttgcaaagggcccagctcttctttccgactcatggtccactgaccgcactttgagagaccatcctcacccttgaccacaccatgccctgatgggcgcagtcgcctcctcagaagctgtccctgaccgtcatcctacctatcccatttcagtcttgacattacccactctcctacttattggttcaccttccttcacaactgaagctccgtgagaacacgtgaacagaacgcggccaccacccaaagcataactgccatcattgtgtggggtgctgcatgcagaatgatgagaaacagagcccctgacctggtccctcagccccttcatggagtccctgtgctccaggtcctgggccttgagttgtaccatgaggacaaacaccttttcccgccagctgctcagcagagatcggcacttcttaggatactcgggctccagcacatctgaaggctggatctgcatgtggaaagagttacttctgagggagcaggaaggggtgacctttgttgttcctgtcctgctggggcggtggagtgaggttttgggatcctagcgggatcccaactactgcccccagagagggaaggccagggtctggcggatgagggagggtcctaccttcctggtcagctcctcttcctgcagggcaagcatgtgcgtgaggctctgtacccgaacctgcagcaactccacggtggcctgaaggtcagcccggtcctccctcaagtgctggaagagcatggtcagtcagggtctcctcactacatgcaggtggtgggcagtctaagccgggtgagtgagcggcgacagcatggcctcccttcccgttcctccctcctgggccatccccatccccacctgcacggtgtctagaagctcctcccgttctggctcccatgcctgcctgtgaacctcaggagggacttgttcccccacgtacttcctcagactttccaccaaggtcacctgagcttccagctcttcttgagtcttgctagggtggaggcagaacccggacagtcctcagcggagcagcccagaggcccccaccatgccacctgcccggcccctccctctctgctgcccctgccctgccccgcccctgcccgctgacctcagctgaccccgaagcagctcggtctccttctgggccaccgacagctgtttgatttcccctgcccgtttcatttccaggctattcagggccctctccaagccctcggccttgctggtcagactggcaagagccatctcgtgagcctgggtcattgaggatagctgtggaggaagagcacattcaaggccagccggggcaggccagagtgcgtccttctcttccaagactcaagtctcagttctcagcacccacagtgggtggttcagaggtccactcttctctttatcccctccacacatatgcagtgcacactcaccaacacaacacacaacacacgacataaacaacacacatgttggtggagcatgcctttaatctcagcacttgggaggcagaggcaggcagatctctgcgagttcgaggccagcctggtctacagtgcgagtgccaggatagtctccaaagctacacaaagaaaccctgtctcaaataacaaaaaacaacacacacgtggcacacaccaacacaatacaccatataaacaactcccacggtgcacactcgccaacacaacacacaaaaacaaaaataaatctttaatgtgggcagcacaccccagcatgagagccctccaacagatcaacctgctataagcaaatggagaattctctgcatctggttcttcccggttagtttcaaacaatccaaactatagtatagtcaattcctgcctgttcacttccctgcctctctgtgtccactgctaacacctggagtaacccacgcccgctgcctcatgcctgagtgtttgtgggctgggaagatggctctgccagttgcctccttcacaagagcgaggccctgagttgggatccccacaaactatgtaaaaaggtgggcacacctgtagtcaccccagctctttgagatggcaggacacacgggcagacccctgaagctcccaggctagctggtctggcctgcctgacaaagttacaggccaattaaaaaccctgtctcagacaaaagggacgtgaggacccacacctgaggttgtcctctgacctccacaagtgtgcatagcctcacccacctacatccacagctgaatgtacacacactcctcagtggtgctgagcatggtggtggcagatgcctataatccatgtgctggttagtttttggtcaacttgacatggtaaaggttttttgggttttgtttcgttttgtttttgatttttcaagacagtgtttctctgtgtaacagtcctggctgtcctggaactcgctctgtagaccaggctggcctcaaacttaccaagatccaccttccaagtgctgggactaaaggtatgcaccaccgctgccaggctgtcaaggtaaagtgttttggggagcggaacctcaactgagaaaatgcatccatcagactgtcctgcaggcaagcctctaggacattttctggattaatgattgatgtgtgagggtccagcccacagtggggtggtgccacccctaggtaggtagttggtcctgagttatgtatgaaagcaggctgaccaggcctcgaggagcaagccagtacacagtgttcctcctccttggcctctgctccagttcctgcctccacctccctcagtggactgtaaccagggaaatgcaagccaaacaaaccctttccttcccaggttgctttttgtcacggtgctttatgacagcaaatagaaatcaagctggagacatggctcagaggttaagagcactggctgctcttccagaggtcctgggttcaattcccagcaaccacatggtggctcacaaccatctgtaatgagatctggtgccaccttctggcctgcagggcagagaactgtctacataataaataagttaaaattaaaaacagaaagaaaacccaccaggtggtggtggcgcacacctttaatcccagcactcaggaggcaaaggcaggtggatcactgtgagttcgagcccagcctggtctacaagagctagttccaggacagcctccaaagccacagggaaaccctgactcgaaaaaccaaaaaaaaaaaaaaaagaaagaaaagaaaaagaaaaacctaagatgttcttgggaagctgagtcagaagtagtgcctcaggttcaaggccagccagggctatatagcaagaccctgccttaacatcctccccaccccctaatgccataggcaccaagcctgctgcctgacagtgcatttccccaagctctctcctgaggctctccctgctccctttgttcaggtactgtccctccttcaggaaggcctctcatcctttccctgcctgcagctttctgagcactggcggccccagatgacggccccagctgatgctacatcagcagctgaccctacttcagcgtgtcctcatgaggatgctctagggtgggagggccttcacactagaccccaggcagtgccaggggcatcagagcagcccgagctgtggaaccagtgggtaaggtgtctgccctgcttcctcctgcaggatctgccctgctgccagccccttctctacaagtatctgaaatgaagcacgaagtctttttagacataaaatacaaatcggattgggttatttccctgctttttcccctggagcctggcatggtggtgtgcacctttaatcccagcacacgggaggcaaaagcaagaggacctgtgagctgcaggctagccagagctatacagtgagaccctgactcaacaacaacaaaaaccccttcttttccggggactctggggctgaacctgcagccttgcgcacacctggcgagcactctgccagtctcttaaaacctttcactggtgtttatcatctgtccacctatcagcagttaatctcgctcacaatgactgtagagtcgacttctgcactcggtaccaattacacgggttatcaaatatcaaagcagggtgtctgcttagtgaagcgaccaattcggagaaccttctcggtgatgactcacagggcagcaagccaattgctgccccgatatacaaaccagacactcatctttaaagcctccctccctgcctctccatcgcctgaagtggccctccctgtccctagaccacattactgcccctgcaccctgaggcactttcccagctgcaactggcttataggcacacgtcctacaccagactgtaattcccttcttgagaagagactgaggcaacttgctcgctcaactgatccccagctagctcctacctcaaggatggcaaagagaagacacactgggcattctgactggacattcaatccttcccagtcttctgcaggacccaaaccccacttctccactccctccctccaccatatttcccagaagagtacttggcaccgaataggaagaaatactacttccggagtgcaagctcacttggcttccaagaaacaagtgcagtccaaggaagacccaaatacccaagttctccctgccgagatcccacggctctgctgctacgaggctccctgaaatttgctggaaagtgcaccccgaaaagtttctcagccccgctcacccccatgttcacctgctcttggtgcagagtctgaatctcctgcagttccctctggttcccctcctccaggttcttccggaccatctcggctccagccaaggcagcgcgcaggccctcagcctcagcttggccagctttctctgccaccgcaagagcgtccatctccatggcctgagcctccagcctcatcttctgctgcagggaggtctcccggagcatccgaacctcctcctccagccgtcgtaactcttggagctgccgggagatcagctccgcctgctggctcagggcaccggagaccctcagctccagagaccttcaaagacaggtgggcacgggtgagacctgtccccggtaccaccgggagggtggagacagcaaagagaatagtaaccctcgactttatgtggggaagcaggggctaaggctgaggcaggaggatctccacattcacaccatcacctatcaagtccctactaaatatgagatccactttctgggctcagggaaccaacctaaaccaacctaaatccctccagagatccattcgtaagcagacagattaaacatcaaacctgcacgtgggcagaacacattcccagtgcgagggtcagaagaatgtgcagagctggatttccagtttaggacagctaagcggcagggactgatcttttggtaccaagtgttaactacagacttcttggttgtttcatttgagacagggtcccctgtcgcccaggctgaccttaaacatagtacactgcagaggctgtcctggggctcgggacactgctgcctttactgctccatctgtgcacccacacacaaattacacaaacataacaaaacctaaagtcacggggttggggagctggctcagaggttaagagcactggctgttcttccagaggaccagggttcaattcccagtacccacatggtggctcacaaccgtctgtgactccagtcccaggggatcaagcaccctcacctagacatgcatgtgtaaaaataaagtcactcaagtttgctgctggtcggtctcttcagcttctcttcctgggacctctcaggtgtcagaggtggccttccctcaccctgcactacaccagtgcacctgtggccttccctcaccctatacaacatcagcgcacctgtggccttccctaaccctatacaacccccccaggctcttggtgagtgttcaccacactgtccggggagcctgaggacgctccatccacaaatgactcagtcatgcatatctaaactagtttgtgtggaggctcctgtggtatcataggatctcatgtgactggaggctcgtgaaatgacttgccacagttccctatgatctgtctcctaacgtcctgtcccccttcttcatcatgctttcttccttggcaagtggcaaagcaacactccggtatactgggagaggcacacatgaaacaacatgagtaagactccttactctcacacacagacacggctcagtggttgagagagcttgctgctcctgcagagaaccccagttcagctcccagcacccacattcaatggctcacagtgcctgtcactccagtgccagggaatcctacaccctctttcggcctccaggtgggcatgctcacatgcagatacatgcacataaataaaaatacaatcttttttgttttgttttgtttttttccccagacaggattctctctatgtagccctggctgtcagggaattcactctgtagaccagggagggagtggccttgaactcagatctgcctgcttgtctgcctctctgggattaaaggcaggccatgcccggctcaaaaataaaatcttaaaccacatatgccgagcatagccagctccagtggtgtatgccgggaaaggcccttttaactaagagccagcatgtcacttcgtttcacaatggcttctgggcaatccatctcctccctcagacatttacactccttctttattgttaactatatgtttttacttgataactgtttttgttatatataattttactatgttaaagtaaaagtaaacccttctttttatttagacagaaaagaggagatgatgggggatgcccttcagtatatatgtttcttttattggttgatgaataaaacactgtttggccaaaagaggcaggaagataggtggggcagggagacagggagaaccctgggagagatgcagggaggagatgccatgtagctgccaaaggagtaacaggtctgggcattttctggtaagccaagaccacgtggaaatacatagatttatagaagtgggttaatgatgaagagagagctagccaccaagaagccctagccattggccaactgttttataactaatatagtgtctgtgtgtttatttggggctgaagcggtggcaggacctggaggaaaagaaactctagcaacacttgttaattgggaatttaagtccagagcgcgcgctctctctctctctctctcctctctcttgattttctccagggcataatggtatatgcagtgtaggtaccaacaatggcctacagaaaaccacacaagttatggaacccagggctgctgaaataaaggaatgtgtgtataaaggatcattagcaagtctgagaaaaaggtgattgacagatccctacctgcctctctgccctggcccctgcccatctccatagacatcctgttccctcatggtcactgtgggcctctgagagtccagctgccgcctctctaggacatcttggtcaaatgtggattggaactggggaatgtctgaagcccaggtcggggccattctcggccgagcttggaagtgggagggaggaaccagtccagcaaaacctgagggggtgggtcacaagagtaaagactggcagcttctcagagagagagaggaagacggagggagggagggagggaggaggagagggagggagagagggagaaagacagaggcagagagacacagagagacttcccagcctccttgattggccttactgacctgagggagacaacatctccactctatctgaagcctctcgatcttgtccgcaagagtgtaggttcccctggacagtaggagaaacaaggagactccagttcagttttcaggccaccttccaaagaggaagtcctataataacaaagccacaatccttcagttactgacagatctgcccagctctgagcttctctctccctacttccctaacaaggcagacttgcttgtcccgaacacacgctcctgacaaaggaaccaggcaacaatcatggggtaaatgtaccgagatgggggccaggggatgctcttggggattttgcttctactacaggattgtgagtggtgcctttaccttcctccttaagtgtctacgatccctgtagctctggtctggaggtgagcgggcctgttgtgaaccccgtctccacagttctcgccatggtatggtagggacgttgggaaacccatctaggcaccaccgcgccatgatttctgggtcatttcctacaaaagcgttagcccaaggcctggcaccagaagaatggggcctcatgtagggttaagcggcttccctaggatccccagggaatgcaagcagcctggagcgcgttgccaggcagccagcttcctgttatctcatcggagtctccctgcagcgggcctcagtttctctctatcccctctgcttccattcccgaagcccttcgctgctcagagtcctgcagcatcttctttgtccaactcccgtccgaactcaaattttttgtttgtttgtttgttttccactcacagagatccctnnnnnnnnnnnnnnnnnnnnnnnnnncgcttctcttcctagtcctactctgcatttttcttgacgttatggtcccggtcgctcgctgtcctcaggtctgccctctcctctcctgcacacacccacgggctcatccccctcactaggaccctgagctgtaaggctgccccgacctcctcatctgttctttcaccgggctcctgcacccctcctgccctgtggaccccctccaccctcctgagcaccccctctcaggcccctttccgcccccaaccaaccgactccggccgaacgctccttacccagcgcgaggtccgccttcttgccacgccccttagcccctggcttccccgctaggcttcccgccctgagcacgcatgcgcgcggcgggtgggggggcacagggtgtggagtccttcttcggggcaccccgcaagcgcaagaggagagggtgagctccaccttgttgcagagttagggacctgtctgcgccgccctttgtgggtgacagcggattcccttccctcggggcaggacagaaggggtgctctacctggattaggaagtttgacctgtaggcttccctcccggctcctgcttacactcgaggggacacgttcgtgtcgcacgcacgtccgtgtagcgggacctcctcaccccgctggggtgtccccagctgccgcttaaagtagctttgccttgaacagattgctacagcctccccggatattctgcggcctgaggacccggcatcacggaggtcccacaggacgtcttcctggttttgcatcgcgaaagggcttctccggaattgcttttgaagtctcatcttgacagccgctagctacagcggttgcatgcgtgtccaggcctctggcgctcttggaaatctgtgtttctcaagttggcattacccacagtggggctgctgacgtcagacaactgaaccgaagcccccggtgcatggcctgggagtaggagaggtgatgaactgctgagaagcggtgcagaggggagcacccccccatgctgccctgcttccagctgctgcgcatagggggcggcaggggcggtgatctctacaccttccaccccccgtccaggtcaggctgcacctatcggttgggctgcagggctgacctgtgtgatgtggccctgcggccccagcaggagccgggcctcatctctggggtccatgcattgctgcacgctgagctccaaggggacgactggcgggtcagcctggaggaccacagcagtcaaggtaagcggtgagcaggcagccccaggatggcatgagtaggggagcctctgggactccatacctgcctcccagagtccctgtcaatctctggtagagcagacaagcaggatccggtttgatctgcccatgagagctgtgcaggactaacctgcccggctgctttagctcacacagggctaggagggaggcgctggggtgtcatcagtaaagtggacattctagcactatgctcacacttgactcaagtgtccagggttgctgaacctccttgttcccattaaggcggtgttctagtgacctaggcattccttcccagctcaaggcagcctcagaagcctggcatccacagttcttccatccagttgctactaggtcagacacaagctctggagaagcctaatctgaggtgttttataacagccagcaggagcataccgttgtgggacaggccctgtagcgttacatgaagatggcgctgacaccgtttacagtcaaagagaatgagagcaggagggaagtttggcggtgtgtgtacactgtgatctcagcacttcagaggctgaggcaggaggttggctcctgagttccgggccaatctaggtgacagattgaaactctgtcccaaaaggaaaagaaagagtggaggtgtttagcggtagggtctgctcaagcaggatccagagccggtagcggtggcggctcaggtttttaatcccagcacttgggaggcagaggcaggtggctctcagagttcagggccagcctggtttacagagagttccaggacagccagggctattacacagaaaccaaaccaaaagaagaaaaaagcaggagcatagtgaggaaacttcccatttgtgaggcctcaagtttattgtccctgtcctggccccaccctgaaaaacaaatggccagctcatggtacctctcaccagacatttgtttctattgtcatttgtcttgtgccttaccatcaacagggactttggtcaataatgtccgactccccagaggccacaggctagagttgagcgatggtgaccttctgacctttggccctgaagggcaagcaggaaccagctcctcggaattctacttcatgttccaacaagtccgggtcaaacctcaggactttgcagccatcaccgtccctcgatctaggggagaagctgggactggcttccagcctatggtgccctcccagggggcaccccagcggcctctcagcaccctctcctctgcccccaaggccacactgatccttaactccatcggcagcctcagcaagctgcagcctcagcccctcaccttctcccggggtggtggcagaccacagagcctggctgttcctacgcagcctggagaagtgggagcctcaccacctgctccacccacgagaaaccggaggaaatcagttcacagagtgttggcagagctggatgatgagaacgagacttccctgagccctctgtcagtcctcatggagcccaggaagaagctccgcctggagaaagctgccttggtgtccagtgggtaagttgagtcctcagtgttaatctgtcagtaccttacacccgagactcctttttatagcctgagaccggagtcttcaaggcagggatgagcagtacagatgaactctgggttagctttcacccataaactcagaagctagttgtgtgagcttggaagagtaatggttagaactagaccaaagcaaaacaaaacaaaaaaacaaaaatatccaggctagagagatggctcagcagttaagagcactggctgctcttgcagagaacctggcttcaattctcaggacctactacagttctaaaggatgcaatgtcctcttctgacctctgtggccaccaagcacatacaagctaacaaaatactcatacacataaaaataaaatacaggcctggcattgggggcgcacgcctttaatcccagcacttgggaggcagaggcaggcggatctctgtgagttcgaggccaccctggtctccagagtgagtgccaggacaggctccaaagctacagagaaaccctgtcttgaaaaaccagtaaacaaacaaaaccaaacctggggtaggtggcggcgcaggagtgtctcactgggacattacttggcatgcacctgacttgcccagagttggagtcacagttgtgtaaataaaacagttaattcctcagtacttgatagttgaggtggaagacaagatttccaagcatgggaccaacttgacccatactagagtaagcaggttagttacccagaggcaaggttgtcaaattactcaggagcacccccgctgtagatgagtggggagccctgtgtagccccttgctgctacccacttcaagacagtagcctgggtttgcccgtgatggcgcctggtacatgacctgcaatggctgtagcatccaggccatacaggatgacatgtgggctttccaggccaggaaacacagatatggttctgggccagagtaaggagaacttaggggctagagtgatggctcttgtagatgacttatgttcagcttactccagtcccgtgggatctaatgtctcctggccaccaggcacacaaatacacatacttacatacaggcaaaacactataatttttttaaagaaaagaatggatgctaagaaatgtctcctttctccaaaggagggattaaccacattgctacagactgactaaaggctggggaaccctcacggctgatgtgacaaaagagagagatggtttcctgctaaggatgttgctgccttcaagttaccagtgagctggaatgcccagtaacaaggaatctagccctgttcccatggacgcctgagtatctgcagctagagcaatcatcgcagaaaccacccgcagacttccttatgtcatggctagcgctgtctgagtctctgagtggctttccatagccttgcctttataacaaaataaactgcttcatccacataggggtagcattcttatgagtctaagcccgctttcgaaatgatgggaagcctagacttggtatagtctgcagatggaattccccacagcagaagcacctgtgggaaccacatggccaaggaataagatggctgtgagtgtgaaagcaattgctgccaagcctgatcacccacactgttgaaggagagaatgaatgttcacaagtcgtcctcatgctatggcactcactcaagtagtcacacatatataagttttgtggttttggggaggcagaggggatttttgagacagggtttctctgtggctttggagcttgtcctggaactagctcttgtagaccaaactaggattaaaggcatgcgccaccacccagttacatacagttttaaagttgagtatggtgtgtgtgggggggggtggggagttgtctggagagatggctcagaggttaagagcactggctgctcttccagaggtcctgagttcaattcccagcacccacatggtggctcacaaccatgtaatgagatctggtgccctcttctggcccgtaggcatacatgcaggcagaacactatacataaacaactctttttttgtttgacaaggtcttttttttttaatttgcttatttttattacatatacagtgttctgtttgcatattttgcctacacaccagaagagggcaccagatctcattacagatggttgtgagcccaccatgtggtttctgggaaccgaactcaggacctctggaagagcagccagtgctcttaacccgagccatctctccagcccctgtacataagtaactcttactactatgtgttcctggccagcttgatctacacaagatcctgtcttcaataagaaacaccacaaagggtagatttctggtaaggccgacatagaacaaaaataagtcttcaagactgggtttttagttggaagagatggctcagcagttagttaagagcgatggatagcatttaatcccaacactgtaaaggtagaggccatcctggtctacagagttgcagggtagccagactacacgagagaaaccttgtctacagggacgaaagcatcagctgttcctgtaagaggaaccaggtttggttcccagaacccacatggctgctcacaacttacaaactacagctccgggggattcaataccctcttctgtcactttacacacggtgcacatacatacatatatacatacatacatacatacatacatacatacatacataccaaagaaaaattggaattttaaaaaacaatttggggctggagagatggctcagtgattaagagctcttccagaggtcctgagttcaattcccagcaaccacatagtggctcacaaccacctgtaatgagatctggtgccctcttgtggcctgcagggatacataataaataaaaacaaacaaaaaaaacccaagccgggcacatgcctttaatctcagcactcaggaggcagaagcaggcggttctcagtgagttcgagaccagcttagtctacaagagctagttccaggacagcctccaaagccacaaagaaaccctgtcccaaaaaaacaaaacaaaacaaaaatctaggccaggcagtggtggcacaagagtcaggtgaatgtctgagttagagcacagcctggcctacaaatcgagctccaggacagccagggctgttacacatagaaaccctgtcttgaaaaataaaacaaatcagtttagctggcatggtgagacccgcctttaatcttagcactccggagggcagcagtaagcaacactcaaggccaaccagtgagttccaatccagaacaaccagggctacacagggaaaacactgttcaaagactttgtttgttttagtttaagcccactaggacctcgagaatagcatggtgactgagggatattaaatgactattccatccgctggcagagatacgatcaatctaaaacctcagcaagtatgtaatgtcttcctctataggttgaattccaacccaagtattcctttggcattttgtaacctccaacagtttgaatggcagttctgtttgaggactgcctgggtatgaggatccattactgggtctctctatccccaggctctctagtaactaagggaagacactaattaaagtttagtgatctaatatggctcaggctttattgtttaaaaacaaaatgatgactgacagactcataatcaacagcatcactgaacttctgtctccctctactgtattctgtgctttcgatcccctcgggaaaggaacttaaccccaaagctgtgatggttccaggttctctacctcatttcccttgcctcagctcacctcatcatccccaggcagggctggtgcctcagtttgaatgcatgggagagcccagagcagtgatgggaacagaggttaaggcctcaccctcaggaaaagggacagcagggtagaaagtggtgaagtgggggctcccatagcttggggcaccaaaatggggccctgggggcagagggaaagatacaggcccccctgggaaaggagacccggcagcttcatactcttctcgttgggtatagtcggtacttgatcgtttgcccttctggcgccggttacagaaccacactcggaccacctaggtatagaagactgacgttagctcagggatgctggagccagaagtgaggaggtgtaccacaggtcaggatctgggtaccacggaacagggtctgggtacccacatccttctccaacccaagctgatcggcgatggcactgatctgctgcagactgggctttgggcactgtaaaaacatgttctccaggttcccccgcacacggttctcaatgctcgtccgctttctctttcgagcctgcaccagggtctcggctttgcatatctgggcaggggagagaggttgacagggcaagtttaggatttggctggtcaacacagctcctcgttggtgtgtgacttgggagcaaattgctaagggagtgaatgttgactgcatgtggcccccaacacaaagttccattgggcttggactgcttgcctgggatgagagtgacccacgaaagaaggaacctgattggcaaatgttaaagccctgggttccaatcctcggcgctagaaggggaaaaaccaacaacaagacacaggatcgctgcctctagtgggagagggagactcaagggaggattggaagcagcaggcaggattgtaccacagggaaggcaatgtgcatgcgatatagctcacctcctgaaggttctcgttgttgtcggcttcctccacccacttctccagcagggggcgcagcttgcacatgttcttgaaactgagctgcagagcctcgaagcggcagatggtagtctggctgaacacctttcctgggaaccaatcaaagggaaagtgaggtagcatcatggcccccttctcctcaatgtctagtcctctccctctacacaagtgagggagaggtaacgcctaaaacgctcgccccttgcacctacactgagagctgtgacagctgtggggtcgaacgtactaaggggaaacccaccgaagagaacgcccagggtaagccccacgtcggcctgggtgtaccccaaggtgatcctcttctgcttcagaagcttggcaaactgttccagttccttctgcaaggccttcacatcctgggactgcagtgagaaacaggacttaggttgagagtcatactgtgagcggtcagtctccgccactgggacccagggggttggtctgtgaaaagatctcagcatcccagactgcccactaaaaatggtctgcttatgtaaataccattcactcttggtccctaggtgccagggaccgcttttcccccatgcaactggccacattcgagacccagagttccaggcatggcatcacttgtctagtatcccaggcaaattcccatctgctaactaattacccaaaacagccccattggcaaaatgtcattatcctagttttcagtaagtcttaagtctacagaaatagccagggactgtagagcaagcatgcaatcccagcactccaggggcaggcaggactatacagatagtctcctagctcagaacaggggcctagagaaaataaacatcaccaggtccattggattctaaacctataccttcccccagcttgaagttcctaaactataacaaagcacaagtggggatattgaaccagggactcgtgcactgcctcggtctctcaagccctgggttaataggatcccccacactctgtttggctcctttagaaacccacacaccacagagtagacaaatgccccggtctcatgagctgacattccagtgaggagaaatgggagtgctgtggagaaaaccaagagggcaggatagtgggttgtataagtgaccatttgaattaatatggtagtcagcgagtcaaatgagccttggaagctgagtgagatgtcaccaaacaaaatctgactcacatcctaaagtatggatttggtgctagccagacaaacttgagtttgatccccccatgcccacaggtgcacagtggcaaacaacaaatgtttggtttatcttttaaagttaaggcctggaggtggtggcacatgcctttgatcccagcccttgagacgcagaggcaggcggatatttgtgagtttgaggccagcctggtatacagagtgagttacaggacagccacagctacacagagaaaccctgtcttggaaaacaaacaaacaaaaataaataaatagtaagcaaggctatggcagacagtggtagttaggaccgggtggagaaggcagaatggatggcctgttcacccacgtatgagtggacgaaacaaatatggcgggagacatttcaggctctaacagaagatgaaaagagaggcagttgtttggtggtgtaagtgagcattgacgtaggagaggggcaggagcaggttggcagagcaaaggttcaggactgagagagaggtctatcttagaagctcctgttaagtctggccaaccagaggacagacaggagcagcagccatcgaggaactccccaacgcagttccgaatccgtccggaaggtgtttcaatgggaagagattttatcagcttcaaacagactgatttcaactccaacagctcctcaaaaagaccaagtgcccccagcttttctaaatcctattttgtggatttggaattagttaaactacagttacttgcttcattaaggccacttaggacatgagataaactactaatgccgtcctaggggactaccgatagctaaaaagatgcgagataatacataagcagacacttggtgggggggacgcccaattcactaattactaagaggtaggggctactggccggcattggcggccgctcacgcctcctcctctagatgcctaattgcttacactggcttcccagtgctgctgggcatctgtggcagcccttccagggccggctggaggctatcaggccatcagcaaagccagtgcactcacagaaaggtctagaaatggcctggagacaactcctacctgagtgtgtctgtttcttgtttacagcttaaggaagtcaggccgaaatggaccagatctgcagctccagctctctacactttgtgtaaaagggttactaacacatgggtccgaggcacaaggtgaggacggacaggctgtaaacttgactggagacgaacccaacccaacagcatccagagttcctatcagtaaccagtcacacccaagcttctgagttaacaataactccagggcaggcagcgctttcaccctccagccatgcttaaccctaaagccaaagtcctgggtctgacagggatccaagtccccagaagggctaagtgcggtcgaggaccagttgaatcccaccaacactgctgctcagtcaggcccagaaatcgaccagccgacatgacaagagccggccttaacaatcaaggccagttcccggttcctgcaattctggcttctagttcaaaccctgccctgcttctcaggaacaggcagcaaccacaaccccttctttggtaggaaggttgtactgcaggctcccaatcgccttcgctgatgcctctgccagtgcagccatgtcccccccccccccacccacctacctcctcgggactcggttccaccttctccaacttcacggggacaatgggcctggcagtacagggcccaggggaggactcctccgagtcgttctccactcctgctcctgactggccctcaggctgtgaagtctccaggccaactggcggcactagacccagtccaacctgaggtccacagtatgccacccctccacagaactcgtatggtgggggacaaggggaaatccccagcacttctgagcctggtccaacccctggcccgattccaggcccacctggtggcccttggaagcttagccaggtccgagggtccacccagccaggctccagccctcctgacccatcacccccaccaggtggaggtgagaaggcaaagtctgaagccaggtgtccagccatggggaaggcgggcaccccaagcccgggggcctgaccaaaggagggctcacctagggactgttaaaacctctctccctccctccctccccaatcccaccctctagccttgacctctggccccgccccctggatgggtggaggagtaggcaatgggggtgggagaaactgaggcgaaagatgtttgcctgtgtctggaaacggaaggctgcggacaccctgaaggagcaaccttcagggcaggaccccagggggccttcattttccactcaccatgtctactcacacctacgatgggcccccaacacctcagagccgcccaggatcccttccacttctccacattcctcagggagcaagtgcttgtctccccatcccaccacaaagcctcttggtactacccccccccgtcactgcagccacccacatttatcgaatgccacgtcccaagcatttctggggtcacctcggttctttcgcttacgcaagggcactgcccgcccagccgctcaccgcacccatctagaattctaggttctagataccgctgtccaccctatctctggggacaggctggcgggcggaaggacgagggaggctgacactccatactcagtcctccagaccttagaggctcctcaccacgggactcccaggcccaaccccatacgtccccagagaggtactggctggttctgaattctcagcgtacattttccaacccaaatgacaagccaatccgggatccccccccacacacacacccgttgtaagacctgcactcaggcccacagttccctcacagtcaaagcctaggcttctccttcctcaaagaggctcagtcctccctcccccaccccccagcccaggcctccagcctagttcctgggtggagaagcccaaagggtggtaggtgtgtagaggaaaaaaaaaaaaaaagacttctggttcaaagaagcctgggagggactggggggaagggtcaggacaatggccttggctggacaatcctggtccccagagggggcagctctaaccctaaacaagtgctcaacccttgaatgggcctggatggctcccctggggacaacttcctgctccccaacccccccagccccagtcccctcacacaaggtttccctcagagctctctctctccaatccctcaaagactgagcctcagagctcatctcggtacccgacttcctttcctcttggggactctggtgttcagcctcccctcccccagtcccccaggccgaggatacctttgtttcggggtctcggctatctgacagatgccaagggatgggattaggaggaggggtgcaggacgcctacctttagctttgctagagggattttctgggcctggtctgagaaccctccagtatcccgttgctggcctggtgcttcgtttatgtttgcaagagaatagccctcggagtgcctgtctgcaagggatgatgtttgtctgtctgctctgacaccttgccctaaatgaaggccccggggtggatcacacagtccccaaaaggctcccggccaaagcaccccacagtgtagacagccagaccagagttctgagcctgagctctgacctctacttggctactccaggtggagcctcacctggggctgttggctaggatctgtggctctagctgcctttgagggcctgagtgttccttaaggagtcacccgacagtaatcaaaaagcctttgtcatttatttacttatttatattgtttggagatggaacactactccatattttcaggctgattacagcatgagcaattacctaacccaattctctgagacttttaaataaaattacattttgtgtgtgtgtgtgtgtgtgtgtgtgtgtgtgtgtgtgtgtgtgtgtgtaggtcccctctttccaccttgtcagtccagatggtcttgcttggtggtggctgagccttcaccatctctctggccttccttctgagccctacacttcttcctcatcctcctagttctatacatgaattgcagtactttttccataggttagtttgaagatctgcagacagcaaggctggagctacattcacaaggcagcctcgaactgccctggtaggcagattaaggaagggtaggacaagaggcgcccctcccaacccatcttctctgcccgcaggacagagccatcacacatctttgtcatgcatttacctgccgtctgccctgaagactcagcctccggggggaagggcaggagcaggctagactcccccacacccagcttctccacctgccagcctgaaagtttcctctacaacaggcccagtaacgacctcccctgctacacctgttttcccagtggcccatctggactcaacaccaaacttattctgtggattataacgtgtggttgctctaggtggtgacacatggtcagggcaagaggtacattctgagtgcttggctgcttagtgactggctggctatctgagccaggctggccctaagcattcctggcatctaatgcagaccttaacagcaagttaagtttgtctgaagtcccagtaagtcttctcagaactgacctgaagctgaggctctccctggcctggtcccatgctgtcaacccattggccctggagatcagaaggctggtgactaatctgaccctaaccctaacccttgcctcttgggtcttgggaaatcatcataatatattgtcttgttttgagacaaggtctccctacatcaccataatatcttaaatccctcaaatctgagccaaaatttattaactctccttgtataccatattttaggatcaagtcaggacctgtctagagagaagcccacacttttgcagccaggagcagctcaccaacgtggcaaggaggtataatgggagccagatattattcacacctgtaatccaagccttgggagtcagaggcaataagaccataagtcccaggccaggggctggagaaacagttcagctttaagagtgtatactgctcttcctgagacctttttgaattctgttcccagcacccacattggggggcttataacctataattccagctctaggggacccaagtctctcacttccctgggcatctgactgcagatgcccacatccacacatggacacacacatatagacacatttttttttttttttttccctcggaaactaggtttctctgtaggccttgctgtcctggaactcattctgtagaccaggctggccttgaacccacagagatttgcctgcctctgcttccctattgctggaaatgaaggtaccatcacttcctggtctgattttgtttgtttgtttgtttgtttgagagtgtaaggccaatcttcagaagtttccaggccagcttgagccaccacaggagaccttgtctaaaactaaataaacaaaggctttgatgggaaagctttggtgtgagcctggctctgctgtgagccccgccagtcctcactgggtttgaggtgtgatggaaaaccagctaaatggactcatatgaaggataactagactagagctggggaaccacttattttagcttctaggttctgtctctctatgaagcaaaaggaagaggagaaatggggagctgtggagaagtgggttcagtcagacctggcccagccagaaaatagtttcccttgatcattttacagggcttcccctgtggatctgcagccaccccctccaactgacctgctggccgcaacttctcttcccaaatccacatgttctgactgggttggcaggtgagagcaaggagtgggaatcgggaagaagccagagttgtccacactggcttggattccttgccttggttttttgtgcctaaccaaaaagacctgagggaggctgaagcgaatcttggagatggctcagtgagcagtggtattctctgagcctaacaacctggatttgatccccgggggccataagatagaagcatgttgtcctctggcctccagaggcatgctatagcatggaggcatgctataacaattgggtacgcgcgcgcgcacacacacacacacacacacacacacacacacacacacgcacacacacgcacacactgcaataaaaatttaaagatctagaaggtaaatgtgtaggtcagtagcaggaagatcaccacttgggaatgcatgtgccagagttcctgagctcatttcctagcagaactacaaaaaagaaaaggaaaaaaaaaaaaaagggaggaagagaagaataaaaaatccacttggaataaatgaattctagatttcctttccttattctgaaacagggttacagacaatagaggctgcccctgaactctatgtagccaagaaggaccctgagttcctgatctgcctagcttcccagttctagtgagcatagtaaaaaaataaaataaaaaggcacccactagaccaaggctgcaccagagcccagtgacatcctcattcaagacaaccagcccctcaatctgctttgcagctggagagtctcccccaggatcctgtacctgaagtcagagacactgctagagcctggacctgaccttcagcaagcagcctgggacacagagggttaggactgcagttaggaacaacatagagtgtgaaccttgtgtgatggccctcagcataataaaataccacttttttaatactaaccatgaatatctaccttcttgctggcaacaccagtgctaggattacaagtgtgtgtgtgtgtgtgtgtgtgtgtgtgttcactactatgcctggcctaactcaccattttcttccaacttagaaaaaaaattgctgtcccattcccacacccccccattctcaatggaaagttcctctctctccctctcccttccactcctcctcctcctccctctccccctctctctctcctctcaaatagggtttcaccgtgtagccctgactggcctagaactcaccttgtataccaggctggactccactgcctgggattaaaggtgtgtgccatgcccaacccaagttttgagattcttgaaataggagaatctttggaagagccagattgaatcagagtcagtttgttgatgggaggtcagactgatgtactcagagagtcagtttcaggctttaggagcagagtacacccatgagctacagcctgtgacccaactagagctcctggacttatactggctaaagaggtgattacaactgcggccaaggaagaaaaagaaaactataaaacttttatcacagttaggtgtggtggcgcacgccgcagaggcaggtagatctctgagttcaaggccagcctcgtctacagaggaagttccaggatagccagggctacaaagagaaactctgtcttgaaaaaccagaataaattaataaaattttttgtttgtttgtttgtttgttgagacagggtttctctgtgtagctttggagcctatcctggtactcattctggagaccaggctggcctcgaactcacagagatccgcctgcctctgcctccccagtgctgggattaaaggtgttcaccaccaatgcccggctaataaaatatttttaattaaatttttgtagcgtgtgtaaacagaggaggccaactttaggcagtactctgtcttcttccatcaagtgggcactgggaattgaactcctggttgtcagatttggcaataagagtccctacctaccatgcccagaggctgaaagggaggtcctgtggctgacctagggccctactctctgtgcccttccaaagtgccctcagcatgcatgtccaccttccctttcagggttcccaccagggtttctagagaggattttccactctgggtcacaacagcatctcctcctgtcctccccttccctgtagctctctgcttgtttctaattcagaagacgctgtggtgctgagaagggtgtcctgcagttataatttacgggatggtttaccccggctctcggctttcctggtggctcacagaccaccctggtctggagggtgtgtgactctgtcacaaaaaagccaggccatagctcttcccactcctccaaatacctggaattcccttctccactgacagacatggcactcagtctcccagatacagcctctctgtcacaccggtgctcagacaaggaaccacgccatactccaccctgtgtcccctacagccagtggctccctcctgcatcacagctgaacctccttccttcaaaccaccctcacccaggagagggagataatagcccatctccccaagggaagatcaagtgaagcttgtttagagaccttggtgcttacactctctgatcgccacccccaacccccaaaagggtctcactttctatatagaccaggctgatctaaaactctgcctctgagagagatcttcttgcttctgcctttgagagctgagacctcagtcatgtgctctcatgcccaggcctgtgcagatttcctgagttcttttttttttcttaaatatttattcattatgtatacagtgttctagctgcctacatgcttgcgtgccagaagaaggcatcggatctcattgcagatggttgtgagccgctatgtggttcctgggaattggactcaggacctctggaagaacagggaatgctctcaacctctgagccatctctccagcccgattttcctgagttctaactgaaggagtgtacttccacccacccccacccccagcttatgttatcttcgcttttgctctcaaactccaaaagagatgtccccgagtttcattctggcagggggtagggatggggtaaaactgaatcagacaggctggggtatagctcactggagagtgtttgcctaggatgcagaaggccatgggtagatcttatccccatcccacccccaccacacaagattaaaagggacaatccatgacattgtatgggagtgtggctcactggtagaacacatgccaaacacacacagggctccaggttcagttcccaggatttcatagaaaacaacaaaaacccgtacaagtgagaacttaagggctgggctggagagatggctcagctgttaagaggagtagctgctcttgcagaggaaccaggttcaatgcccagcacccacataccagcttacaactgtctgtgactcgtttcagagtttcttttgtcccacagggtcacacacatataggttgtaaaagcgtgcctgcacacacacatacggcacagggacgcatgtgtgaacacacaaacagaaataaataaataacttaaatagcacttgttgctcttagagaagacctggattcagttcccagcacccacattgtgactcataaccatctgtaacttcagttccaagggatccagtgcccccttctgacctctgaagggaacaagcatgcatacaatatcatacaatatacatatgatgtacatacatgcacgcaaagcactcatacacataacataaaataaataaatccaaaataacaataataatagaaaataatttaagccaggcagtgatggctcacgcctttaatcccagcactggagaggcagaggcagggggatctatgtgagttccttcgaggccagcctggtctatatgctaaaatataagccaggtgtggtagcacatggctgtcatcccagtactggggagactgaggcaggatctcatcttaaggccaagctggcctgcatagcaaaattctgtctcccaaacagtgaagtaaattgtgaggactagctgctgctgctgggaggtgcacagagcatctagtagacccggggttaacagctgattggaaacaaggttatgtgtgctagaataaactttgcttaggaccctggaggagggacagggtactccaggaagaaagctgttgctcctgggtttggaaaggctggattggatttcttttcccctatagggaaagctaaaggggaggaagagaggtggtcttatgctcacatcctacccttttcctgtatccacatccagaccattgtcaatgctggggagtaactagggaaatcaggaatgaaatcctcaggcagaagaatgtatcccaggatctcaggaagtgtggagcccagagcctagcactggacccagcactgaagcagaacagatcctatacagagggtaataaaaacagatccacatatttgggatgttttttattttgcttttatgtttgtgaggggattaatttttatttttattttttttggtttttcaagacagggtttctctgtgtatctctggctgtcttggaactccctctgttgaccaggctggcctggaactcatagagatccatctgcctctgcctctgcctctgcctcccaagtgctgggattaaaggcatggaccaccaccacccggctatgagggtgttaattttcaaatttttttttttaaagattttatttattatgtatatagtcttctgcctgcatgccagcagatctcattcaaggtggttgtgagccaccatgtggttgctgggaattgaactcaggacctctggaagaacagtcagtgctcttaaccgctgagccatctctccagccccaattttcaaatttttttaatttttgagattatagtataatcacatcatttcccccttctatttcttccttccaaatcctcctaggtaacccttcctgctctctttcaaattcagggcctcttattttcagtaactgtcactaagtatgtatacatacatacctatatattcttttttttttttttttttttggttttttgagacagggtttttctgtnnnnnnnnnnnnnnnnnnnnnnnnnnnnnnnnnnnnnnnnnnnnnnnnnnnnnnnnnnnnnnnnnnnnnnnnnnnnnnnnnnnnnnnnnnntgcctcccaagttctgggattaaaggagtgcgccaccaccacccggctaatacctatatcttcttaaatgtaactgctcagtctgtatattgttaattgtttctatgttttcggagctgaccagttggtattggatgaccaattggagaaacagtcttccccaggaattcctgagttgctgtagttctttgtgcagggctgaggcctcctggctttcccagccactcccccatgtctattgtctccccgatcagctcatgtttagtcttctttctgagactttatgacatccctagaagacacagtctcacagccaactctcatcctctcaccatcttcccacctctcttttgcaatgtttcctgagccttgggtgtgggaggtgttttgtagaggtgtcagctggggctgggtttggcaactcagtgtttctattggctgtggctttcctactgtggccctctatcccttgcaaaaggaagctgccttggtgaggggcgagaactacactaatctgtaggtgtaaggacaaatgtttaagaggcagttaggggctatgctgacttagtaaagagacagttgcagattctcctccaagatctgtgacttgactagcttgggtagttagctaggtctccaggaccaggcatgacttccctcttgttgagtgggtctgaggcccaagagagctgttgttcaccaccaaggtatgtgctccattactgcactcttagggtcctatgccggctctggtttgtaggcatcatagctgaactgtaggtttcggctagccctcaggggagagtgttaagagctcaggggctgggccctatccaggcagttgtggcacacagcacagctttaatcccagcactccagaggcagagatgggtggatgtctatgagtttgaagccaatctgagtttgaggacagcctggtctatctacagagccagttccagcacaggctccaaaactacagagtaacccatcgagccgtcagtgcttcccacttcccttaataagaatcagtttcaaggcttggctcctgtggagacctgcatctgcctaggatttactaaaacaaccagatagatgtctctcacctcatgctagtagtgagtacctctggcaattaaaacttctaagccaggggctggaaagctggcttagtggttaatagcacttactgctccctccaagaggacccaggttccgttcccagcacccacatagcaagcagctccgagccatctgtaatgttagtcccggggatctgttgccttctagccaacctccttgggcactaggcacacataagttgttcatacacacaagcaggcaaaaacaaaacaaaaacaaccaaaaaccaaaacaccccactcatatacataaaattaatagatctaaacttttttaaaaacaaaagctaagaaattttttgtctttttgagacagggctgtcatggaaccctgtctgtagaccagggtggcctcaaattcacagacccacccgcctcctgagaaagtcctggggttaaaagtgtgctccccacctggctaagaaacaaagaactagttgggcagtggtggctcacgcctttaatcccagcactccactaggggggcagaagcaggtggatctttgtgagttggaggccagcctagttgcagagagagttccaggccaggctccaaagctacagagaaacccgctctcggggcgggggcggggggtgtggggtgtgtgtggggggagaaaaataaaaaaaccttctaagctgtttttgcttgtcttctaggagacttctaggagagcatggctgattcaacctcccttcgtaagtctgagagtgcgacagagggggctctactgatggagactgcacctttactcctctctcttccacgttttcagagccccactttccggcttcctgttgcctggagagccctctgctggcagcatcttcaacaacctttctcaaacctgtttgcatccaaggcataatccatcccttcgctcgggaaggaatcccaagctgctacacagtgggctgccgcagcatctagagctttttatggatctgctcaacacttctacaaaaggaggcagcccctaagatcagggctcattcatcctcttgccccgtagacaagaaagtcagtgccatagactgtttgctttctctctgacccgtcaagatgggctagtgtcgtggtctcctccatactgccaggaagctcggcagtcaccgaagggaccagaagtggcatgataaacaatacaagaaagcccacttgggcacagccctgaaggccaatcctttcggaggtgcctctcatgcaaagggaattatgctgggaaaggtaggggttgaagccaaacagccaaattctgctctccggaagtgtgtcaggctgcagctcatcaagaacctcgagaagatcacagttttcgtgaccaataatggctgcctgaacttcactgaggaaaacaatgaagttctggttgctgggtttggttgaaaaggtcatgctgtaggtgatattcctggagtgcgctttaaggttgttaaagtagccaatgtgtcccttttggccccgtacaaaggcaggaaggagaaaccaagatactaaattatgacagtggaaacacagtaataaattttcatattctgaaaaaaaaaaaaaaaaacccaaaaggccaaaaactctgtttatgtctttccaaactgaactgttgggaggagatcacctgtgatcccacgcctgcacacacacacacacacacacacacacacacacacacacacacaccactctggaggctgaggcaggaggatttccaattcttttcttttttccttttcttttttttttttttttcccagacagggtttctctgtattgctttggaggttgtcctggaactctctctgtaggccaggctggccttgaactcacagagatccacttgcctcttcctcccaagtgctgggattaaaggtgtgcaccaccaacgcccagctgaggatttccagttctgggtcagagtggtgacagacctagatcctgctcaaaccaccacaaaccaacaagccaggtgtggtggaactcattgtaactctagcactcagaaggcagagagaggatggagggtcacagcaaaaaagccagcctggtctacaaagtgagctccaggccagccagggccacacagcaagacaccttctcaaacaaagaaaacccatgaaataaagcaagaggcgatgggtggacaaacaacccacttctgagaggcaaccagcttctgaaggaatctgtcttcactctctgggctccagacaagttcacagaaccctataaaaggtacagtgtatgggagggcattgtttcccaaacggcaaggtatctacgccactgagcacatttgaacatttgagttcttaactcattagtgcctcgtgtgtgcatgagtggcgaccaatggcggcaggtgtgtggtgtggtgtggtgtggtttgcctgggcttacgcttcctggagcaagagcagcctcttgcttcaggttgggtctggttcagcctgagccagaactctacaggacttggaaaaggtagaggcagcaaactctgctcacgtgcttccagcaatccctggcttagcttctgccaagagcccggagggttacctgagtgccaggcaccttgcctatctcccctgtacctggtggaagtcttggggaccctgtggcaggggcacagcttccaaaattagggaagttggaggggataaggacagacatgctagtgacccctgtgaagtccatcccaccatcttattctttgagatagggtttcccactaaacacgaaactcccctttttggctaggctcccaggatctgcctgtctctaccctccttgttagccaggcccagcttttttttttttttttcatgaaaatgtttatttccaacaccacctgtttaatataaacacacagaaacgcaaccttaccagagctgggaagtccttctgtataacaaccagttaattaactaatctctttctctctgtctctgtctatctgtctgtctgtctgtctgtctgtctgtctgtctctctctctctcacacacacacacacacacacacacacacagcccaccacagagccaagactataatgcgcacatctccacaacccacacacatctttttttttctcttcttcttcttcttcttcttcttcttcttcttcttcttcttattattattattattattattattattattattaattcaagttagggaacaggcttgtttcacatgtaattgccctctccctcccctcacccccattccttctcccccacccacacacatcttacaaggatctgtgcagttgttccagccaagaaaagagtgactcaggcccaactttcatgtagttgctggggactcaaactcagctcctcctgggttcacagaaacccctctcatccagtgatccatctccttagtttcttgctttcttctgtattcagcctgggatcccaggccatggataacactacccataattaaggtggatcttccctcattaattaacctaatcgagataatcaatcactggtatgcccagaggctggcctaatcaggacaacccctaactggcatgcccacgggctcttctcttaggtaacattagcacctgtcacattgacatcctctctctctctctctctctctctctctctctcaagacagtttcaccatgtagctctgtctggcctggaacctgaaatgtagaccaggctatactcacactcacacagatccacctgtctcttttttgtatgtagagcgccaaggacactaaagacagttatgtgccactaggccagaccatcaatgctaaccagtgggtaagaagtcagcctgagctacactatatgagaccctgtcacaaaaatcataaagaggtactggagagatggatggctcagtggtcaagagcactgtctgtggaccagcgctttccctaatatttgtaactccaaatcaggtgtcagatgcctctggctgaggggagagggaagacctctcacactcaggtgcacacactcacaggcaaatgcacacctacaaataattaaaaataagtcttgcagcgctgtggtggtggcgcacgcctttaatcccagcactctggaggcagaggccagaggatctctgagttcgagtccagcctggtctacacgagcttgttccaggacagcctccaaagccacagannnnnnnnnnnnnnnnnnnnnnnnnnnnnncctccccccccccccccagaagatgtttttggtggattgctggctcaggctggggccagagtattaccacggatagtgagtgtgaggccacacttagtagaaacagttttccagaggccataggtttctttattaccgtcttgcttccaaaagggtcttttccttgcatatttgtcagccacaggtgtcaggccggccatctggggtcataaataaacttcacagactggctgaagcgtcttatctccccctcaggcaggtgactagtcagctacagcttcactggccacaccctggctaaagaccaacannnnnnnnnnnnnnnnnnnnnnnnnnnnnnnnnnnnnnnnnnnnnnnnnnnnnnnnnnnnnnnnnnnnnnnnnnnnnnnnnnnagcaagaattcaagtgtcctggacaacacctggggaccagaattcactccaggagttttccatttcctgaaaagatctttcccatccctcaagaagatgaaagaatttggtctagaggacatttgttgatttttgagacagaatctcagtacttagccctggctgttctggaacttgctctgtgacttgatctcaaactcagagaaactcagatggcctcttcctctaaactgttgggaattaaaaaataaaaatttaaaattgtgttgtagagatggctcagaggttaagagcactggctgctcttccagaggtcctgagttcaattcccagcaaccacctggtagctcacagccatctgtaatgagatctggtgccctcttctggtctgcaggcatacatggaggcagaatgctgtatacataataaataaaatcttttaaaaagatttaaaatttatgtgtatgtgtgtgttggtactacacatacaggttcctgaggaggccataagagggcattggatcccctggaactggaattactggcagttgagaatttcctgtgcaggtgctgggaactgaactcaggtccactgcaagagcagcaggtgtgtcaacctcagtgccatctctccagcccctccttccctctagggcttgggatgcagagcaaagtggagcattacctggagtgggtaaagtactgggttcaatcccctgcaccataaataaataaagaaaataatcccactgaaaaatgaaaactactgattaaaagaatcattttactttttagcaattgcatcactgtggtgaagaacaaaaaaaagggggggggatcaaatcctgctgggagagttgggctcaagaatcccagaacccttcaagcatattgtaatcctagcactcagaggcagagacaggagaatctctgagttcaaggccagcctggtctacagagtgagcaccaggatagtcagggatagacagagaaacctgtctcaaggggtgggggaaagattcccagaatactttgtgtgtctccacttggtgcacttgggcttggggtaagggagagagggagtcaagagagtagatccaagacacggggcttgtgtcttggcccagaggaaggaggggcagggcagggcagggcccctaccagccgcagctagggccttagtatctgggcttcacttctcatccattttgtcctttcttagctttggtgatacagggtctggctcagtgatggtctcctgtcactagcattgtaccttacctatgtcagagtcccttggagggtttgctgcctatggcaccatcataggcccccacccccttgtgtataccccaccagtgcctttaaagaaaccgccttgtccctccagccgccgtgcttgagggtgcctgtgacggggttggggtgcactgcatgacctggcttgtctttctccacctcctcttcttcttggctgtctctaaagaccagcggggcagagggaaagaagcctttctcagcctagtatcagccttgaaaacctactgaacaatttttttttttttaaatcacacattgtcagaaacagtaccccaaaacttgaggtaggtattcaagggctagatgatcttttactgtttcacaggattgtataagtcagaaaccaaagcatgtcagtttttcacaaggagccaggactgctgggggagtttgagtctcggtttgtaaaacctgtttcaagcggtctctccggaggctgaaggagctaagccatcaggaattcccttgtctaggtaccagagataaagaagaaagcccagccccagcccagcccagcttccacccacattgtcaccatcacctgagggcacctgtcttcccggtcacctgtggccactttgttctggttctggctccaggccacattcttttgggaagtcactctcctcaaggtcactcaggctgagccgtggaggtcttcattgtcccctgcctctcagtggcagcttccctttgtttgctcagtttctgtaagctcactgatcacagatcacatggtatcgggaagtagctccacactgaagaaaggaaaagaatggaaggaaaagtgatggaagccaggtgtgcagggccatgtctgaaatccaaggactccaggagcggaggcaggaggaccatgaatatatgaccagcctaggacacagtttgccttcaagccttgtgtgtgtgtgtgtgtgtgtgtgtgtgtgtgtgtgtgtgtgtttaagagaaagagatgttttacctttttatcattattatttattcttctctcatacattatacatcctcaccacaatcaactttttaatcccccccttctttttcaacacagggtttctctgtatagctttgtaggccagtctgccttgaattcacagagatccatctgcctgtctccagagtgctggtataggaggcttacgccaccactgccaggccataaaaaacaaaacaaaacaaaaccccccaacccaaaaaaccaagaatccgaaaaaataaaaagagccatgagcataccatctatcccagcacttaggaaggagaggcaggtgggtttctgtgagttggaggccagcctggtctacagagtgagttctaggacgagtcggactacacagagaaaccctgtcttgaaaaacaaaacaaaacccaaacagaaaaccctaaacaaacagacacatgaaaatcctatccagaatgagtagtactgaatattagcatccctcaggtggagattcttcctactattttttaagttccctcctcctctttgcatcatgatctcttcacacacgggttaaagcggaatgtggagactcacgctaatactctcagcacttgggaagctgaggcaggaggatcaccttggatttgagaacaaccttgaatcacatagtgaaccgggctagcctgggctacaggtgagatcctttctcagaacccactcccttgcaaaataaaagaaaacgcgggagctggagagatggcacagtggttaagagcaccggctgctctcccagaggactggggtttgagtctcagcacccataagcctgttcaccctagttctagggaattccgttctctcttctggcttcccaggggcaccagacacatacggagacaaagcatccataaccgtaaagtaataaagtaaaatttaagaagacataataaagaaacaaattcagtttagcaaaggacaatttgttaaactcacctgcatggccgcaggactgaggcttccgcgagctcagcgcgccctctagtgtcctttaggcttcatcacactgtcggtgggaaacactgcacttgggtacacctggttatgtttgaagccaatcaccaaattttcagcgtcactatggccccttctgctaacgctgtgattttctcgtacccctcaaactatgtcactctatctgagggcgagaggactcccagagcccctctggttacatcgtagccctgacagcgacaatacaaggccaagcagaagcccaccacccagaaacagcgccctgtgcagtgtgtaaagtccctgcctttgtcaaactcttgactccactcctgctccctccccaagtgtctgtcattgttggtgagctctctaggatggacagggcgtgccctgctttgtggtatcgtctcctcgcagccctctctctgtcttctgacttgagaaaccagctaagaaaccagttaagctccgggcagcggctctcacagcgtggccctggggacaagtagcagatgttagcactttttaggagtacagtattcagggcgatgagatggctgagccgctgagctcttgactcatactgtgaggatttgatctctacccgcagaattgttcttttgacacattgtcttactatgtagcctcgactgacctggaacttgttacgttccagactggtctcaaactcatagcgatccacttgactctgtcccttgagtgctgacttctgggattaaaggcatgtgccacatggatcgggtttctttataaaacatatttacttttgttttatgtgtgtggttgtttttgctttgcatgtatataggtatgtgtacctgggcccgaagagggcatcagatcccttggaactgaagttacaggtgcttgtgagcctccatgtgggtgctggaaactgaacctggtgctttgggagagcagccagctcacttaatcatccctgactatctctcaagcagccttgtagaaatgcaatttcttttaaaaaaaaattgcgagagaagaagggaggtcactgcgtgaaggagtgtatccgctgccgcctctcgggtgcctgcctcccagagctgagagcgtcctactgccggcaggaagggaaggatcggatcatatttgtgaccaaagaagaccttgaaactccgagcagtgcagagctggtggctgatgaccccaatgatccctatgaggagcacggattgatactgcccaatggagatattaactggaattgcccatgcatggtggctcacaaccatcccttatgagatctggtgccctcttctgatgtgcagatatacatggaagtagaatgttgtatacaaaataaataaataaaatcttaaaaaaaaagaaaagggggtgtgtatacacctatgtcctgcataaacctgtccttgagcattaagctattgctggacgtactctgtaattgccctggattttgccactttgaaatactgtgctgagatttctcagcaaccaaaagttgttactcaggaaagtttatcgtgagaaagctgatttattctggcccattgcatcccttttggtagatttcacacctctttgggaaattatgtagatgccaaaactccttcaagagtgggtccattcctattagaagaggctgatggtcagatacttgagttggagtaaatggggttgctgccttatgcctggcacccatgtttctgtatttgcagtccagactccaaggtgtctacagatgcagggtaagattggaccctgtgactcccagtccctcctaagtgaaaggagaggcctggttttcagtttattgttttgctgttctgaaagccctggtttggggcccatgttcactagtccagtcagtcgtgatattgaggtggggacctagctgcttccggagcagaagccaacagaggaaacgtctgaatgaagtacccaattaaaaagaaacaatttctgtcctactttgaaaaaaaattgcttctgtgctgtggcagtttgagtgtaatcggtccccataatttcatagggagcggcactattaggaggtgtggctttgttggagtgggtatggccttgttggaggaaatgtgtcactgtaggggagggctttgaggttttttttttgtgtttctcttttgttttttaagaaccatcaatctaaagtagatgacttatcccttaaatcctggagtcaccactggattcccagagccagggagggagagggaccttgggcgcagaacacagatccaacaggacagatctgagataagaccctgtggatccctcctctcttccatcctacaacccagtatagattcttaatgatgcaaaagaagagaacctccagggaggggcctggaaggaggcaggagctcaggagactgaagttcatgttctgaatccacagtctcctgagtgcaggggcctagattggtcctgatgggaaaggatggaaaaacacattttaatgctgtcactcaggtaccaaaagggataaggaggcaggctccacaggagaagaacaggcctgctcctccgaacaaactaaaatgtcaacaataaagagcgaatatgggataaagagctccagtgggggtcagagcccaggctgacctgtcccagctgccctggctgctcacaatcctgggacaagaaatagctctggccaatccctgtgtccctgtgatcacagatctcagcacatggttctaagtgatgaagagaagagatccaggaggtgacagagctgaggagtgaccatgtcacagccaacatcaaattgagctccacctgggcacagccctgttatcactcagctttcacagtctcatcttatcacaccagatgcacacagcacaatgaacacagattctggaaggttctcaatgctctatttatttcctccacaaattcttagtatctcaataatttatttaacagacaatcatcctgtcagatcaggatgtgaacaatcaagttcaaattgagatccttattttcagaggggaagtcaggggtgcagctcagggcagcacagaggtgacaggatgaagatgtcccctcctgtctgctggaacaggaaggttggctgtggaagggaacacaggcagtgcagggacagggtcctggtgtgcagggctgggctgggctcccagttcttcacattgagcccataggatcagagggaatatcaggcaatgttactgagagtgaattgaatgtccctggatgtcacaggagaggcctgaacaccagacagctgtcttcattctacaaacaagagtcatgaacaatcactgtgaagacaacatccaaacaacccaccacaccattcactcacaggtgattctgggagtccctgaagccctatcatgttcaatttgcgccccccccatcccaaatcaggtcccagagtgtcacctttacaatctgagagagacacatctgagctctgggaactgtccctgcctagggttaaaatatatactttcataggaagataaaaacatgtcccctagaagattttgctggaggagctattatggatttccagagatctccaaatactacagcttcaccccaagggtctcagggacaatctttctccccatacttacctagacctggagcatattttcctcctttttcacctgtgagaagaaaagctgtgagagaccaggaaggagcccaatcctaggaattttctagaacctacagaagaccccaggttagagacaggagctatggggtgtggatgtgtttccatgaggcagagcacacttctaaaggggctgagagagaactcagaccctgccctttcttacccgagcctttcttcctcactagagccaccacaggtccaatgatcacagctccaaggagaaccagagcagcaatgactgccatgatggggacagtggactgaggaggaggctctgggaagggaagggcaggaagggaaggtgagggtcatgaccccagctctcagccctgatcctgctcatgctctgtggaagactccagctttccttgaccccagctctgtacccctccctccttaccccatctcagggtgaggggctcaggcagcccctcatggtacacatggcatgtgtatttctgctcctctccaataggcacctccacagctgcccacttctggaaggttccatccccagaaggtctggtctccaccagctccatgtcctgagtctgttcttcctcctccctcttccaggtcagggtgatgtcagcagggtagaagcccatggcccagcacctcagggtgacatcacctttagatccaggatgatgggtcacatgtgcctttgggggttctgtgtggaagatttaagaaatacaacaataacaagataaactgaaatctgcaaagacaaagttaaatcaatgatgacactgtagaatcccaagcaccagcacctcagggtgacatcacctttagatccaggatgatgggtcacatgtgcctttggggatctgtgtggaagatttaagaaattccacaataacaagataaactgaaatctgcaaagacaaagttaaatcaatgatgacactgaactatgtgtctgaacacttctgactgtcatcacactagtgacctgcaggggacgctggtcccccctcatcactgatctgtacattttcctggggggacccagaatctaagagggaatctcaggaaccagcaggtcacatggtcttccttatgtgatgttctatagcataagttaggtggtaaaagaatggaaggaggaatggaaaataattaatttatacttgtgattaaattcataccaaaataagaaattaggggcacagcctacttaaagggtgcccccaaatgcttctgccaccattgaggcacaaccactgtggccatcttgctgaccagcataactgtctgtccaagtgaacagccatcaccaagcatgcagcagtaatggtgtgaacctctgacactgggaattgaaaatgacttttaaattcctgtctttggggggaacaagatacaaggtgttgtcacccaggatccctggaagttgctgtggagcccagtgcagcactcactgagacacagtggtgttctcaggagggtatgggtgttttctgtcactccagtctttgagttgcagaagctcctgtctgtgaggaagttcaaatcccaattcactacaacaacactgtaacttcttgggactgagtgagagcaggggtctctggatggttaaatctggcagaaatagtttaaattactggaatttttctagtttaaagggaagctgacttaacttgtctaattatccagagaatcagtgctttttggcacctgtgagactgatacccatgataatacaagaggagggagagaagcaatagcaccatagggaggaagaaaaacttaactaaaagcaaaatgacaatttcaaaataaaaaagaaagaaataaaggaagaaataaataaataaataaaagaaaggtagaaaggaaaccgcacagtttagatatctcctagggtaccccacaagtgctcattctaggaagagataaaattgggatgagggagggatgcaaacctcacacactagaatctgggagaatagctggagttctacatctggatctgcaggcagcaggaagagtgagaaccactagaaccaaagcctgggctggagagatggctcagaggttaagagcactggctgcccttccagaggccctgagttcaattcctaacacccacaaggtagctcacaaccatctataatgaggtctagtgccccttctggcctgcaggcattcacttaggtggaatactttgaatataataaataagtaaaccttaaaaaaaaaaaaacagggctggagagatggctcagaggttaagagcactggctgctcttccagaggtcctgggttcaaatcccagcgaccacatggtggctcacaaccatctgttatgagatctggtgccctcttctggtgtgcagatatacatggaagtagaatgttgtatacatattaaataaataaaatattaaaaaaaacaaaacaaaacctaccaccagtgactcataccctcaaacaaggccacacccactcccataaggccacacctcctaatccctctcaagcagtgccattctctgatgaccaagcattcacatatatgagcctatggggtcatctttattcaaaccaccacattccacttttgaccccataggttcctatcaatatcataatgcaaaatgcattcagtccaaaaagcccccagagtccctcacagactcaacactatctaaaagtccaaaattcattctcttctgagactcctggcagtgtgtgaagtgtaatccatgtaaaatcaaaataaaagagtaaagcacatatatccaacatacggtggcacctgatacacgttactgttccaaaagggagaaaactgggcacagtgaggaaatactggaccaaagcaagaccacgatcccgctgggcaaactccaaactgcctgtccatgtgtgatgtcaatgcggtcttcaatcttcaactgctttttagctctgttgactgctacaggcttctttctcaggctggttccacagagttttagcacctgtctttgagaggcatcccatgactgttccatcccttcatacaatggcctctctgggcctccatgcagagacaaccctgacacacacagctgacctctgctgcttccctcagccacagagagagattccacaacccatggacaccttctgccatggaaaggacaacactttgttcttcctggagcagatacttattctggttatggatttgcctttcctgcacccaatgcttctgccaaaaccaccatctgtggacttacagaatgcctcgcgcactgccttgttattccacacagcattgcttctggccaaggaactcacttcacaccacagaagtggaacagtagcccatgatcacagaattaattagtttcaccatgtccctcaccatcctgaagcagctggcctgagagaaagatggaattgcctcttgaatacacagttacagagtcagttaggtgacagcacctggacaactgaggcggggttctctagaaggtggtatatgctttgaatcagtgtccaatatatggtatagtttctcccacagccaggatccctgattcagccaggacccacaacatactttctactgggttggaagctcagacttcccccttggacatttgggttttgaagtcctttagccaacaatctaagaaaggaataatagtgcaagaaggggtgattggtccatgttatcaagggaaaattgatttgtttctccacaatgatggcattatggagaaagattatgttgtcaggcagagatggtgcaccctttagtcctagcactcatggggcagaggcaggtgaatctctgagtttgaggccagcctggtctacagcatgagctcctgtaatgggggatgtccttctgtgtgctgtgaatatatgtttctcttattggttgatgaataaagctgttttggtcaatggacaggcaggatgtagccagacaggaagtataggctgggctatgagactagaagaaggctgggaagagaaacacagaggagtcaccaaaggagtaacataccagagcattatgggtaagccacagcatcatggcaatacatagtttaatagaaattggttaattattaagagagagagctagccaataagaagccttagccattagccatacagtttataattaatataaagctcagtgtgtatatttgggactgaagggaggtagaaccgggctgaacagaaacttctgtctacattcttggacagctagggctatacagagaaaccctgtctcaaaaaaacaaacaaacaaacagtcttagtgtcctcttatatggcaactcttataaaggaaagcatttaattggggcttgcttatagtttcagaggtttaatccattatcatcatggtaggcagacttggtcccggagaaagagctgagaattttacatactgaacaacaggcaacaggaagtgaactgtctacactgagaggaacttgaatataggaatcagaaagacaactacactcctggagaactgtcctcagtgaagaccttccctccgttctctgactgctgtgaaccaagtcccaccttcaccactgttggggtcataagtctgacctgtgtcctctcctgtgcttttcaataaagtgtctgcaagaagagccccaggaaattatgaagaaatgtcctatttgttatttgtacaaccaaactccatcacctgtaggacgtaacccaaaaggtacccaagaggcagaggcaggtggatatctgtgagttagagaccagcctggtctacaagagctagttccaggatatccttcaaactcacagagaaaccctgcctcgaaaaaccaaaaaaaaaaaaaaaaaaaaaaagaagtttggcaaatgtatgtgtttcattttgcagagtttggaaaattaaagtatgtgcaccatactacaggtacatattcaggattcccatgggcaactggtttgagttctgaaaaggctgattctgtaattgcatatttattagacattatagctaattaagacagacaatgctccagcatatatctctagtgaaatgaatttttttgcataatacaacataaagtatattacaggcataccacccaatcatacagttatacaaagatctaattgcactttaatagatatgtttaataaacataaatgggtaataaagaccccagagatagattacacaatgcttcattacctttaagtcttttaaatgctaatgagaaagtaatgatgcctgcagagagacattggatagtaggaaaaactgctaaattaaatcagcctgtgcacttcaaagatgtgttgacttcagaatgaaaccaggacatgcgttacatcggagaagacattttgcctttgtgttcattagagaagaaatctgtggatcatacctagaaggacaaagatttgacttgaacaggagaaacctcttgattaggagaggcgatagttcatcaaacatcatggccgttcaatctacactaagttgtaagactaacaaatgctcttcatttgatcaggtacaacctgccaaaaagggaactcgtcaaagttagggttggggaaggggtttgtttttgtctttccaggagaataacagcatccaactaaggactctgaagagcactggacaaatgagacatctgaaggagagagatgaataggtaaaggatgatgtcccaagaaaaagagtaaattgacttaatgatattgcacaaatccaatatgataaattctcataaatctttccagatgtttgtctctgctgttctctacagacatataaggcaaatggtctttttgtagtcccaagtcaatttatggtcatgtttgttttaacatactgtatatgtgtttctacttttgtttaaggaactgcacctacacagcccatttaaaaatgtaatgtaaagctgtagtccttgaaaactattttaatctatttaggataattaagaaatacagttagtcatctaaagcaatctaatttgcagtcaagttatgtgtgttttagggatttagaaagttagagatttgttttagatagattgctggtctttataaaccctcagagacctacacattatggcatttaagatgttttaataacataaggattttcatggcagtgagacctgtctgctcctggcagcaccagtttacttcataaaaggatgatgggcatcagagaactactgctgaccatagagagccagctcctagatggagccctgggtattgagagaaatccacagagtcagcagcaactaaaaactctttcctatctgagggggtcaggagaaatgcgctctcacacctgtgctgatggattccttctttcttctctcatgttccactctctcagatgttcctctgttacactgttggctttctctgttctatttctcatctggctctgtctttactcctggtctttccctctaattctctcatacatgattttatccttctctcgcgatgtttctctcgtgatgcccccctccaagtttctgcccccgttcctttgttctccacagctatttataccacaaaacactttaaacattacatttgaaggtcacatataatttaagtaaatgataaaaaatagagtcatttcaacagctcacaatgcaataaatgcagataaattgtcacacagcaaggaaggaatacttcctctcaggtaattccatgggggatcatcaaagtctgtcaaatcattgggaagggcctaggccctcctccatgtatctgggctgagagaatatgcctccatgaggaatgtgctgccaaagtccattagtgcactagggataaatactggttccattgtcagaggtcacatagactgcacagtcttcctaactgacacccacattcagagggcttggttcagtccagagctgattccccagctttacgactggggtccctgtattctcactaggtcaggtcagctgtttctatgagtttctccagcacagccttgactccttggctcatccctcctccctctctacaactggattccagaagtatggctcagtgcttagctgtgggtgtctgcttctacttccatcagctactggatgaaggctctaggatggcatataaggtagtcatcaatctcattataggggaagggcatttaaggcagcctctccactattgcttagaatcttagttggggtcatccttgtggatctttggagatttccctagtgccagatttctctttaaacctataatggctccctatttaaggtatctctcttcttgctctcctctgtacttcccctactcagtcttctgatccctcttgttctcctccaccctcctcttctccccttctctgtttcctatctcccgcctacacccccccccctgtgctcccaattggctcaggagatcttgtgctttttcccttctccgggggaccctgtatgtctctcttagggtactccttgtttcctagcttctctggagatatggattgtaggctggtagtccctctatgtctaatactcatataagagtgagtatataccatgcttgtctttctgtgactgggttacctcactcaggatggtttcttccagttccatccatttgcctttgaatttcaagattccattgtctccccccctgctgagtaatactccactgtgtaaatgtacattttctccattcttcaattgagggacttctaggttgcttccaggttctggctattacaaacaacgctgctatgaatatagttgaacataatgtccttgttgtatcaatgtgtacctttgggtatatatgcccaagagaggaattgctgtatcttgaggtagtcggatttccattttcctgagaaaccaccatactgttttccgaagtggctgcacaagtttgcactcccaccagcaatggaagagtgttcccctttctttacatcctctccagaataaactgtcattggtgttttgacaggtgtaagatggtatctcagagttgttttgatttgcatttctctgatggataaggatgttgagcaatttcttaagtgtctttcagtcattttagattcctctattgagaattctctatttagttctatactccactttttaattggattatttggtgttctggtgactagtttcttgagttctttgtatattttggaaatcagcactctgtcagaggtggggttggtgaagatcttttcccattctgtgtgctgctattttgtcttgcttcacagaccttgaaagaacaatactcaactttatatggaaatacaaaagaacccggatagtcaaaacaatcctgtacaataaaggaacttccagaggcaccaccatccctgacttcaagatctactatagagctatagtaatgaaaacagcttagtattggcaaaaaacagacaggtagaccaattgagtcgaattgaaaaccctgatattaatccacacacctacgaacacctgagttttgacaaagaagctaaacttacacaatggaaaaaagaaagcatctccaacaaatgttgctggcataactggatgctggcatgtagaagattgctgatagatccttatctatcacatgcacaaaacttaagtccaaatgaatcaaagacctcaacataaatctagccacactgaacctcttagaagagaaagtgggaggtacccttgaatgaattggtacaggagaccacttcctgaatataacaccagtagcacagacactgagatcaacaattagttaatgggaccttctgaagcttctgtaaggcaaaagacacagtcaacaagacaaaatggatcatgtcttttaaataaacacaaatcttaagtatactcagcctgtaaatcctggagtcaccactggaggcagcaccaggattcccagagccaggaagggaccttgggcagaacacagaaccaacaggatagatttgagataagacccgtgattccctcctctctgccagtctacaatcctggtaaattctaaaagatgggaaagaaggagagaacctccagggaggggcctggagaaggcaggagctcaggagactgaagttcatgttctcaggccacagtctcctgagtgttcatgttctcaggccacagtctcctgagagcaggggcctagctgggcgctgatgggaaaggatggaatggaaaaccacattttaatgctgtcactcagggagaacaagggataaggaggcaggctccccttacaggaacaagaacaggcctagtcctccacacaaactaaacagacaacaatagacagtgaatatgggatatagagttacagcaaggtcagagcccaggctgacctgtaccacctgtcctggctgctcacaatcttgggacaggacagggctctggccaatccctgtgtccctgtgacaacagatctcagcatgtggttctaagtgtgaagagaacagagccaggaggtgacagagctgaggagtgaccatgtcacagccaacaacacattgagctccccctggacacagccatgtgcacactcagctcccacagtctcatcctgtcccatcagagacacagagcataatgaacccatttctgggaggttttcacactgccattcatttcctccacaagctctaagtatctcagtaatttatttaacagccaatcaacctgtcagatcaaggatgagaacaatcaagttcaaattgagatcctcattttcagtggggaactcaggacctgcagctcagggcaacaggagaggtaacaggataatataaactccctgtgtgctggaacaggaaggttggctgtggaagggaacacaggggccctggatgtcacaggagagacttgaacacattgtctgtctctccatcctcatgagattgctgtcttcatggtacaaacaagagtcatgaataatcactgtgaagacaacatcctaacaacccaccactcataggcaattctgggagttcctgaaacccaatcatgtccactttgcccctcgtcccagattatcaccttcacagtctggttgagacacatctgagcactgggaactgtccctgctatattcattggaaggcaaaaacatggaccctagaagactttgctggaggagttaatatgggtggcagagctctgcaaatacttgtacaccacatgggtctcaggaacaatcctgctccccacacttacctggagctggagcatagtcccctccattttcacctgtgagaagaaaagctatgagagaccagagaggagcccgtccctaggaattttccagaatgaacagcagacccagtcagacatgggagcaatggtggtgtggatgtgtttccatgaggcagagcacagttctaaaaaagtgaaaactcagaccctgaccttttcctacctgtgtttctcctcctgttcctcacaacaactgccactgctccaatgatcacagctgcaaggagaaccagaacagcaatgaatgccatgatggggacagtggactgagaaggttctgggaagggaaggacaggaagggaaggtgagggtcatgaccccagctctcagccctgaccctgctcaggctctgcagaatgctccagctttccctgaccccagttctgtacccctccctccttaccccatctgagtgtgagtggttcaggcagcccctcatggtacacatggcatgtgtatttctgctcctccccagaaggcaccaccagagacgcccacttctggaaggttccatccccagaaggtctggtctccaccagctccatgtcctgagtctgttcttcctcctccctctgccaggtcatggtgatgtcagcagggtagaagcccagggcccagcacctcagggtgacatcacctttaggtccaaaatgatgggtcacctgtgcctttgagggatctgtgtggaaggtttaagaaatacaacaataacaagataaactgaaatctgcaaagacaaagttaaatcaatgatgacactgaactatgtgtctgaacacttctgactgtcatcacactagtgacctgtagggggcgctggtccccctcatcacagatctgtaaattttcctggggggacccagaagctaagagggaatctcaggaaccagcaggtcagatggtcttccttatgtgatgttgtatagcataagttaggtggtaaaagtattgaagaaggaatgaaaaataattaatttatatgtgattaaatgcatatcaaaatacgaaattaagaggaacggcatacatgaagggtgccaccaactactgctgccaccattgaggcacaaccactgtggccatcttgctgaccagcataactgtctgtccaagtgaacagccatcaccaaagtgtgcagtagcaatggtgtgaacctctgacactcagccagagaaaatgactctccaagccctgcctctcgggtggattacattgatggatttttgtatgttgaaccatccttgcatccctgggatgaagcctacttgatcgggatggatgatttctctgatgtgttcttggattcgatttnnnnnnnnnnnnnnnnnnnnnnnnnnnnnnnnnnnnnnnnnnnnnnnnnnnnnnnnnnnnnnnnnnnnnnnnnnnnnnnnnnnnnnnnnnnnnnnnnnnnnnnnnnnnnnnnnnnnnnnnnnnnnnnnnnnnnnnnnnnnnnnnnnnnnnnnnnnnnnnnnnnnnnnnnnnnnnnnnnnnnnnnnnnnnnnnnnnnnnnnnnnnnnnnnnnnnnnnnnnnncctgggctttttttggttgggagacttctaatgactgcttcaatttcattagaggttataggtctatttaagttgcttatctgttcttgatttaattttggaaagtgaaatctgtccggggtgtattggcttctttgttttctaaagctttcagttgtgctgttaattctctagtgtgactgttctcctgttttttttcatatgggcatttagcgctatgaactttcctcttagcactgctttcagagtatcccataggtttggatatgttgtgtcctcattctcattgaattctaggaaatctttaatttctttttttatttcttcctggacccatgaattgtgcaattgggtgttacttaatttccatgagtttgtaggttttctgtagtccgtgttgttgttgaattctaattttaaagcacggtggtctgataagacacaagggacccctcaattaatattgatggatattaatgaccattgattattgttcattcttgtttgtttttgatttggttatggtggcaagattatgtgtgggattctatcccttttttcttttgactgttggaaaattgggattatctattggctatgtttttctggttgtagttaacttccctgggttgcagtttaccttccagtactttctgtaaggctggattggtggatatgtattgtttgaatctggttttatcatggaatatcttgttttctcaggccttctcaaccccaaataaacacagggacaatatgctaattacaaaacagacagcttcagacatttattgtttcttgagtcagaacttgtccccatgaggcagctctttgaaggtaaagactaagagtcatgagcagtcaatatgaagatatctggaaggcctactgtgactcattcaaatgtctaaattctgagaaatcagggacccagtctttttcttttttcctcagccccagtcccaggtccccagggagtcaccttttccagcctccagagacaagtcagagctctgggcactgtccctgcctgcagaagaagaaatgacaaagcatttaggagactgagagtatgaggctggagtaggaattatgggctggtgggctccccatcagcttcatcccacaggcttcaggtacaatcttgctaccaatacttacctagagctagagcatagttccctccttttccacctgtgagaagaaaagctgtgagagaccagggaagaccccaagcctaggaagtttccagaaacaacaccagacccaggttagagacaggagcaatggggggtgtggatgtgtttccacgaggcagagcacactgctaaagggggctgagagagaactcagacctgccctttcctacctgagtttctcatcctcttcctcacaacaaccacagctccaatgatggtcacagctccaaggagaaccaggacagcaatgactgccatgatggggacagtggactgaggaggctctgggaaacggaggacaggaagggaaggtgagggtcatgaccccagctcacagccctgaccctgctcaggctctgcagaaagctccagctttccctgaccccagctctgcacccctccctccttaccccatctcaggatgaggggctcaggcagcccctcatggtacacatggcatgtgtatttctgctcctccccagaaggcaccaccagagatgcccacttctggaagtttccatctcctgcaggcctggtctccacaagttccatttcctgggcctgttcttcctcctccctttgccaggttagggagatatcagcagggtagaagtccagggcccagcacctcagggtgacatcaccttgagatctagggtgatgggtcacatgtgcctttggagggtctaagagaagagttggaaagatgaggtatttttcattcttcttgtaaattccaggtacttatgtgattaaccctgggaagggataggaaagccagctgcaggtagggaaatcccccagcagatgtctagacaacctttcctttggaaatttgtagaatttgggaaaggaatttctgctcctgagtgggtggggctgagactcaacaccacttgagttggactccagtggcactgtgagaatcagaccaagtctgagagcaaccatgcctcacaggggctgctatcggtccttccaggcaccctgaaacagaccccaaactgttataagaggagggtgagccctgggagagccagtccctgataaaggagaccctatagaacttcccacctcccatatttgagagatagggagacaaatggatattatgtcaaaagacacacccagagtttcccctaaagccagaaaggacacaagggtgcaccctctccaccactgtatttaatacagtgatgattttatatgagctctcagaagcagacagaagattggcataaaagggatcaaagtaggaaaggaagaagtcatactgtccctatttccagacagcttgattctttccttaaatgaccctcttgagtccacaggataacccatggacctaataaacattcttgatttcctgataaaaaaacaaatataaaaagtattcttcacttatcccagcagtgtattttcagaaaaataaattaggaaatgtataacattcaaagcaactccactagaattaagtgtttagagatctgacacaggaaatcatagagacaatgtcagaagatggaatgacaacccatgattctgaactgacagagttaatattgttacaatggcctcactacccaaattaatctgtagatataatctgcaagacttatgaaactctgatatattccatagctttagaaaaaagaaagaatttgtatgaactggcaaaagaccctaatagtcttaaggattaaggtcactgctggagtctgggcagtggtggagcattcctttaatcccaggatttgtagagcagaggcaagtggatctttgcgaattccccagtcttgcctacagagccagtaggactgtcacacagaaaaaccctgtcttggaaaactaaacaaaagcacactgctggagggttgcactccaacctcaaaatatcctgcagagctagagtgacagagacagcctggaactggcataaaatagacaggaaaaccaatagcatacaatagatatcctgcaataaaatgcaaagctatgtatatttaattttcaacaaagaatacaaaacacatattggaaaaagagtccattctacacatgatgtaacaacactgttctttttaacccgagatgaatttagattctcacctctcaccttgtacaaaagtaaacttgaaatagagcaaagaccttattaagttgaagacttgaaacacccagaattcaagaagacacctaggggaaccccttccagatactggggtggacaagaacctcagaagaggacaatagcacagctgctaatcaggccatgcgtcagcatgaagataaagtgtcttcacagcacaggacacagtcagcagagggaacagaaccataactggagaaaacctgtaccagctggactgcagacaagggactagagtcttcagtttacagagaactgcagaaactaaacaccaaggaactaacattgtcaatcaacaaatgattgaaagaactgaatagagagttgtcgtaacaaaagaaaaagcacaaatggcaaccaatatttttagtgtgttcattatctccagccttcatgaaaatgcagactaaactacttagaagggctggagagttggctcagaggtgaggagcacttgatgctcttacagaggacctgggttagactcactgtctgtgactccagtcccagggaatctgactccatcctctgaccccagacaccaggtacatacgtgggcacatgcacatgtgcaggcaaatgctggagagggtgtgtgtgtgtgtgtgtgtgtgtgtgtgtgtgtgtgtgtgcgcgcgcgcgcgcgcgcgcgcgcgtgcaaattaatacagtcattgtggaatcatttttgacatttcctaaaaaattaatcatagaactgccatatgacccagctattttattcctggttataagtctacaccctactggtgagatatttaaaccccatgcttattgttgatttatttattcattaaaagttgaattttttctatcaacatatgggtagataatggaagtttgatacacatgttaagtggaatattgtttggctctaaacaatataatcacaaaatacacaggaaatgcatgaacttagcatgtacactactatgtgaggtcacacagactcaggagggaaaactacagtatatttcctcatatgcagccaacaatatatgtacatatgtaaataagtgtacatttgtgtacagtatagcatgacgaaaagacaacaagaaaggctaaatattggggatgagaaaggactgaccataggtactgagttttaaaacaggttataaagctaattgttttctagttatttacctgtcatggattttctttctagcttcattttttttttttttcgtgttggtgctgggtaagtgctgaattatctttgataaggaatgtgtaagattcaaagtgaacctccacaagatcaatatggctaccacaactatatgtattcactgagttgtatagtctttgttcggttaattttacagtgtgagtttttctgtaatagagttaaaaattaaaaataagtagaaaaaggagcatgaccccagctgagggtttcttcttcctcaggactgagcccagcccgagggcagagggaggagatgcccgagaccccttcacctttgcgcagcagctggtccttccctttctccaggtatctgcggagccactccacgcactcgccctccaggtagtccctcagtctttctgcaataccattctgctccaacttgcccctggtgatcagcgccatggtgtcagcagccgtccacgtcctcaggtcttcgttcagggcgatgtaatcgcgaccatcataagcgtcctgactatacccgcggaggaggcgcctgtccgaccccacttcacagccagccagacattggacagtgtgagagccggggggggggggtgctgcgcggtcagcttagaaccctgtccagtcctggggtcattagcgtcccaggcctcgcctacccgggctgagcccacctcctgccccaacctcccttagattcctctaaactgacagtgaaagtgtttcccagtccgtgtctctctggtcgggagtctctgtgggtcccacatttcgggaagaacctaggacttgggatccgggcgattccggtctgtatatagggacgtgaaggttgtgacctctgacccagggtcactcaccgccttcgctctggttgtagtagtccagcgcagtcctcaggttcccttggctaatctgctgcttgatcttgactttccgtgtctccctctcccaatactccggcccctcctccatccacggcgcccgcggctccatcctaggagtctccgcgtcgctgtcgaagcgcacgaactgtgtgtcgtccacgtagccgacttctatgtaccggggctccccgaggccgggccgggagacggcggtcatgaaataccgcagcgagtgcgagcctgggggcggcgagcggtgagacctcaaccctcctcccgggaccccgggagggtgcgcgggcccggaggggagcagggcgcggggctcgggacgcgggtggggaaggggctgggcaatgacctgggcggccaccagcaggagcagcgtgcgcggcgccaccgcccccatctcagatctgggcatctgagttcctcggtctgcttggactttgcaacaggtgcctggggcgacactggttggttctgcgggatctcgacatccaatgcgggtgagaaccgccgagtcgtcatcagtgtccaggaggaaggatcagacataggttaagagctggagaagtgaaactgggtcctcctggtctctacatggcatgcctttttctgtccccagctcctgcctcctgcagagacgtggtctcaaatcacacaaggcagcccttggagatgactgctaacacttcctgcactgactcctggccatgagggctgcactatctcagcactgcacttatggaccaagttaacaatttcctccatacagtttttttatcattgttgtttttatttatgtattcattcatttatttttgagataaggtttttctaggtagccttggctgatcttgaactctctttggagactaagctgggctggaaactgtttgctagtgtctccaagggctggcattaaaggcatgcaccaccatgcctatttccacacacttcttctgtggagccctctctgggtggacttgtcccttctgatattttcctggctgcatggacacaaatgtcctttcttcacatcatcttgtcagtggagagcacatcttgccagaggtaggctcattgaacaaacccctaagttgtattaagtccacagggaagtccactctggtggcactttcatcatgccagcccacacttctgttagataaaaggacccccctctgacattccaattccagggccacatacagtgcctcatgcaagtgcccttgtcatgcctgaaaaatctctaataaaaagtgtccatccaatccatcagaacacttcctagtcctgacccccctgtttcattaagaagactccacctcctcacaacctgctcttcacaggcctctctccagccaccagcagctgtcctaaggctcctcaagggttctatctgcactgggaaataacagttctggcaccacagctccaggttcttggcttcttgctgcagcttcctccctttgcggggtggcttcctgccctgtcctgtcccctatttccttaggagtattttccctgtgtggctctaatgtctgccttgtcttctgtcacatgggaagatgtttttacactgtgctcatcagtcctagtgtccagctgtctggaagaaccagctcctcctgctgctccttcttgaggtctctttacattaagagctgatcatctgggcctctcttagtcttcttattcttagataagtgcacagacagacagacagacagacagacagacagacacacacacacacagagacatgcatccacccaccttttcagcatggctgccggcttccctttccagcctcattgcttcctgtggcctatgactctgtgagcatggctgtctctttctgctgtcatgtaacggtttcaactgctgctcaaagttatcctcactttcccaggatggatgtggtagttgtggctaataaacccagaaacctctgtcattttcaaggcatccttggagtccccatcaacacagagatgtctgaggccagactggaatttcccctatcagaacccacggccacacctggagtcaaatctaacttctgatatctttctcattgcacagattactgtgcaaactcaagacctaggaagcctcagacttcctgaaaaactaagggaagaattcagagacctccagggagttcagcatttcacccaggcactgttgggttggcaggtgctgcaggaagcagaggtgctggtgcacattcaggacagagaaaacccatgtcctggtcaggactgaggtgactaacttctgaggccctgcctgctgctgtccctggctgtcttcaaaggtggggctggccagcagcctccttgcactccagcactcactcttacagtctgcagatctgcagagtatgggtcactgtgtcacaccaacaggccacctatcactcagaaacctctctctggattccttggtgttcaagcttcactccaagggctacagcctgctcagggcagcagcatggccacaggctccagaccagccatggctcaccctgacaatgggggctactgagagctgagagctgcaagaggaaaggcaccaagaaggcagccaggatgacaagaggtgaagtcctccctcctgtgaactttgacctcagcttctgagtccttgtcctcctctgggacagctacaagtcttcagagttccctgggctcttggtgtccacagccagctcctgcagctggatgccctggagagattcagccccctgcagactgcactgcacaaggtggactgttgatggccttttgctggcttggtggctgtcttgaagctgggtaggagcaaatggtgccagcaggcctgccaaggagtctcagggacatctcctttcatcttgctgaaattgctgggacacagtgttggaaagcttgtgagagtgagttcaatagatattcttactggagaaacagcccaaggttccccaggtcacagcaaactgaatccaaggagctgggggaagtgttctctggcttgggtcttatgcaaaccagggaatggaggccctcaggtcccctggattgtacctgtgcctgtgttgaactcctttctgtaccaggcagttctaggtggtcctgattctatctggctgtgagctactggctcagcaaaatgtgggacaagttgaagccacagagacaggtgggattgtggggtgggggtggggcttgtgcaaccactgccttgaaagctgctgcatctggcacatgagatggcagtttaggcactggatacaggtggtgctgactaagcacagcaggaaactcagaatggagttccagttgtcctgccagctgagcaccagtgtacagtcagctcctgccagtttttcatttcttgatgtcttcttggtggatgactaaagcagggctccagggctccaaggccaaggcctgcaggttttagtgtcaggtggtgggacatgtaatgctggtcccttcctagtcccctgcctagcggtccccagcccttgtagccaagagtgccctctgggagtcaccaggaccaaaacttcagattgggtttctggtaggaatgatcaggatccacagtgaagaccaaaatgttaggcagcctcaggggcccaaatggggtacttgggctacattgcacctccttcacctcctggtgcctggactgcccctaaggcaacccagttgtctgctgtggtttccactgcataggtgttggctgggcaaactggatttggtggctccattggaggtcagcaaaccctttgccagactcctttttaaatactgaaggaaacattgaagttgtgtgtattcctaggctgtcctgtgatggctccagatgtgtacatggtctaaatgggaatgacacatctcctcaaaggtgtgagctttctgtggtgaaaacatttaggatcttgtctcccagctctctgaaagctataacctgttgtggctttctaagtaaccacaccttacagctgccccttacttcctcacccctacctacccaactgtagccacttctcagccactgtcacccccattgtccctttccaatctgtggctgggtccaaggatctgtggagctcaagtccatatcaggatcctcaagggtgtggacatgtgaggcctggacaagacttcctgagctgaagtggttttgttgttttggtttttgtttctcttttgagacaggacctctctatgtagctctggctctgttctggaactcactatgaccaaattggctcagaaattagagattcacctgcttctgcttcccaagtgctgggattaaagatttgcaatgtcttttcctacagctttcctctcagagcagtaggacgaacctactttcgaatccaccctgggcagtgtctctgaaccctgaaccccaagctggcacaccctgggaccataaggaagaaggacaccagcaacatctgaatagaacaggcctagtgttcaaggaagacctgtcacagctgtcctggctgctcctaatttgagggacaggacaaggctctgtccatgatgatcacagcctctgtcagcacgtgggtctcctgagtgaagagaagaccagagccaggaggcggcagaggtgaggagtgaccacatcaaaacccacagcagactcagctgtgcacagcgctgttcacactcagttctcacagcctcatcctgtcccactgcacacacacagcacagtgaccacagattccagaaggttctccatgacatcatttatttcctctacaaagctgtatgaaatcacctctttaatttacccaccaaacaaccctcaggtgaaaaatatgaacaatgaagttcacattcagattcttactttcaatggggaagtcatgagctgcagctcagagcagcatggaggtgacagaatggagatgtcccctcttgtttgatgaataaggaaggttggttatggaatggcagtggtcctggtgtgcagggctgggctgggctcccagttcttcacattgagcccattggatcacagggaacatcagacactgttgttgacagtgaaatgaggggctctgtacatcagaggagatggctgaacacactgtctgtctctaagtacactgcaggcagcagtcttcacactacagaacaagagtcatgaacaatcactatgaagacagcataccaacaacccaccactcagttactttcacaggtccaaaatctcagtgtccctgtgaaccattcatgtcccacggtccactcccatttcatcttcacagcctgtgagaaatacactagagctctgggctatgtgtgtccagggttaataacaatgcacacagagagcttcggaggatttgtctgcaggaggaattataagctgggtgaactccccaccaactcgtggtccacccaaagacctcagggacatgccttcaccaaccacactttcttgaagtccaaacacagctgccagtgattccacctgtgggaaaccaagctatgagagcagggaagctgtgaatcccagaaagtttccagaactggcagcagaccagcacagagggtcaggagacagaagaaaggatgtgtgctgggaatgaaccattttggagcctgtgagtcctcagcagggacattcccctctaacttctgaactctgaccaccgaggatcatgtccccatcgcttccaccatcatggttaagaatctgacctccattttccctgtgctttacagtaaatgattgtcagaacacagacccagagatgggcatggtgtgcccgtgtgcccgtgtgtgtgtgtgcgtgtgtgtgtgcgcatgtgtgcgcgcacgcacaggcctacacacgtgcatgcatgcacacttgtgtgcacacatgctttttgaaggtgctgaatgaaaaacaaaacacaacaacagaaaaaaatgcagaccccgcccttctatttttgtgttctttttcatccacatcataacacctccaaagataaaacctaagatcacagctccaaggacagcaccaacaattgtcctgatggtggtggtggactgaggaggctctaggaagggaagagaaaggaaggaaaggtttgggtcaatcatgacccagctctctgccctgaccctaccttctgcaaaagcccttatgcttttcttgaacccagttctgcacccactccctccttccctcatctcagggtaagggctcaggagttcctcatgctacatatgacatgtggatctctgttcctctccagaaggcaccaccacagctgccaacttctggaaggttccgtctcctgcaggtctggtgtcccccctctccatgtcctgtctctgtgcctcctcatctctcttccaggtcagggtgatgtcatcaggatacaatcccagggcccagcacctcagggtcaccttgagatctgggtgatgggtcccatgtgtctctggtgcatctgaggagaagagtagcaaagttcaggcattgtgcattcttcctggggactgcagcagtgcccatgagaccagaaatggagtgatggaggggtgaaaatcccctgcaccatttcacaggatctgagataacctgtttattatgaaattctagaatctgagtgaaacagtccaggataggagactctaggtgtccccagtatgaagaagggggctcctactcctgaccagggggctgttagagattcagtatcactgcagtcagattcccataactgtgttaagaaaacccggtctgagagaggccatggttcacaatgggcagcggaatgaaggaactgggcttgtttcaagatcttctttccttccccattaagacagattctgaattgtcctgagaggaaggtgagccctgggagagccaatctctagtcaggaatcccatgtgtggatgggcattttgttcacatgtctttaattccagctgaggcaggaggatctcttagtttgagcccatgctggtctccatagacagtcacagaagatccaggactacacagagacaccatcaaaagcaactcaaaagaaacaaagaaagtacaaaaaagaaacccaggaatgctctccctgtatcctttggaagagaggagtgatgatgcaacactgtatccagtggaaagaaacagtgtttcttctgagatgagggtgtccactccctgctgtgtctgagactgtgtttgaaaactcagctattacaatcagataagagataggcactaaaaggagaaaacaggaaaggaagcagccaaactatttctatctccagactacaggatttgtttcttaaatgacctagttgagtatactgcaaaactcttggacatgatcaacacttatggttgccagatacaaaatcaatataaagaggtagccttactttatgccagcagtgtacttccaaaatagaaaaaagaaattaggaaatgtacaacattccaagtaacttcaccagaattaagtgtttaaggatacatatgaccaaagaaagagaagaactctacaataaaaactttaagatctgacaggaaatcacagaggacaatgttagaagatggaaagacaacccaagctcctgtatgggcagtgttagcattgtgacaatggccatactaccctaattaatctacagatttaatgtaacactgtcaaaattctgatatatttcacttttaggaaaaaaatacaggtaatcatatgggatcacaaaagaccacaaatatccaaacaatctgaaggattaagaacagtgctggagagatccaagatgggccagcaggaggctgatgaaggagtttgaagagatccgaaaatgtggaatgaaaaacttccgtaacatccaggttgatgaagctaatttgatgatggcaagggcttattgttcctgacaatcctccatatgacaagggggccttcagaattgaaatcaacttcccagcagagtatccattcaaaccacccaagatcacatttaaaacaaagatctaccaccctaacattgatgagaaggggcaggtctgtctgccggtaatcagtgctgaaaactggaagccagccaccaagactgaccaagtgatccagtccctcatagcactggtgaacgacccccagcctgagcacccactccgagccgatctagctgaagaatactctaaggaccgtaaaaaattctgtaagaatgctgaagagtttacaaagaaatatggagaaaatcgacctgtggactaaaatctgccatgagtgattccaggaagtttgagcagagcccccgagcagtgcaaataccccgaaaagcaggactctgtggaaaattgacacgtgccaccacctggcatccgcttgtggcagttaccagctttctacagttttcttaatcaaaagtggtctaagtaacctgtaaagaaggattaaaaaattcacatgttcaaacaaacaaacaaacaaacaaacttttaaaaaacagtgctggaggttttacactcctaacctcaaattctactgcagaattatagtgacaagataggctgtatgtatcaagtggacattcgctctgccatgaccttgggctgtctggggatagaggagctctctctgtggtggtcagagattgaactgctagattcattcatccctggggcagaacagaagatctgggcgactaggtaacttgttgtggattcgtcagtgtattctaacaaatcctaaataccccttaagccccttacatttggagcccatgtggcatctctggagctgttggtgagcttcccaagccctctgagtctgtagagttcccagcttggatccccaggaggcaggatcccttgtctgcccaggcccaaccagcttgtcctaacagcctccctagcgcccatggaagccagaggttagctgcaagccactgtgtgcaccctgccccacagccagcactactgaacctaacccaactgtggatacattactgcccctcctcagttccaagtctccgaggcctgtctctgccctgcccccctctaggctgtctggctgaggtaacaggctactagagattctggcaggtttaactgccatgttaggaggcagacaattattttaggtcaccttatggtggggcaagtatggacacctcacagttatgtactattcaaacatccgagattccaatgactccccattgaaagacgttttctctctatagtaagatctgtccagtgtgaaggcttgtttgtttgttttgttgcttgagaagtggtgtgtacacagccatactgttctggaactgacagagatcctgctgcgtctgtctcccaagtgctgggattaaaggagtttgtcaccaagaagtaacatccagaagtgaagtcttggtgcagtgaagggctctggactcaaaccccatcaaatgttatcagaaaaaaattattcttcagttataactaaaatggtagaatttggccatgatttagttacaagtatactggctgattgaaaattaaacatgtaaagaacaaagaggaatacttaatcagacacatgaatgtattatatgaatcatgccacggaaatttgattttaccacagagcttttgttctggaacagtggtcttttactttacccgtgttcacaacatcaacataaaacatctgagtcaaagcagagtgatgtagttaagtaatctgtaaccagggctttcatgaaaccaaaaagtgagcaatggcagagagatgctgttgggacagatggaaagcagagcacttagaacttggccatggccccatcccatgactaaagcatcaccttgctcaggtgagcagtcacaggacactgggtgttcctcagggacaaaggctccagagaagcagatgagcagtgtgggagacagtgctggaaagtgtgaatgttgacagttgtgatgagaacacagatatgatggtgactccagtctgaagtgggaaaaacaacaacacagcagttatagcagtttttcaggcaacacacacataaaagactgatttccatattattaaaaaagtttaaatggctagttgttccatctcagtgagctggcattatgtactttattatatgtttttgtaattgatttaaaattaatttgtaaatggggagttgttttttaatctatgtgtgtgtttgtttttagtctatgtacttttacagtttttgctataaagatacagtttaataaagttattatttgaccctggaaaaaaaatggtgagctgttggcagagctcttctttaatcccaggactcaggaggtagagacaggtgtatctctttgagttcgaggccatcgtgatctacagagtgagtttttaggacagaaaccctgccttgaaaaaaaataaagtttaaaattgacaccataaatgggtcatttactgctgattttgtctcatttctttgagattaactgattctcctgtgaggaagcatttgacatttcttcattttttaatttttttttctagacagggtttctctgtgtagctctgacctggaccaggatggccaggatctcagtaatttgtcttcctctatctctggagtgctgagattaaagatgttcaccactactgcccagaaaagttttcactgtttaagaaagctttttaatacactgagatgtgctacatagactccccccccacacacacaaggctttccctgctgatcccaatactccaatattaatgtggtcctcatcaatttcctagctacccacactagtagactctgccttatgagttccagcgttaccatcagaggctgcaccaggattcccagagccagggaggtagaggcagagcagaacacagtcccttcaggacccgatccaaggtgagtcccctctgatgatcctatacacaagggttagattctgagagattgggggagggggagaacttccaggcaacagctctgaaaggaggcaggggcaacagatcaggggactgagggtcacctcctgagtagaggggactttttggcacagggacaggaaaaacacctcccactgtggcccctccccaggaatgacaacagtgctgctcctctatagaaaccaagaagacaagaaataaacagggacctttgttaaaccaccacagctagtaggactgagcccaggcagtccttacactgcagccctggctgctcacaatcctgaacacaggacagggctggggacacccttgtattcctgtgatcagtctgccagcatgtttttatactaagtgacaaggacaaaagagccatggaggacatagctgaggggtgacaacaaaaccaacatgcagtgagctccacctggcccagcaccatcctcactcagctcccacagacttctcctgtccctgctgacggtcagcacagcagacacggattctggaaggttctccatgctgctatttattttctccatcacactttcagaattctcacctttaatttgaactgccagtctctcaggtcaaggacacgaaccatcaaattcatattcagatttttattttcagtggggaagccaagggttgcagctcatggtaacaggaaggtgacaggatgtagttgtctcctcctgcctgtgctggaccaggaaggttggctgtggaaggaagcaggagcagtgcagggccaggatctttgtggacaggactcggctgggctccccaatttttctcattgtgtgtaaggaaaaatgcatacattgctgcctaaagagaattcattggctcttaagtcagaactggtcactcagtccaatgaggcagctgtcctaagcgaaagaacacaagtcacaaaagtcaatataaacacccctcaaaggcccaccagtcactaaaaggcctaagtccaagaggacttgggactccatcaattcttccttgcctcagccccaatcccagccccccagggagtcaccttttcaaacatccagacaagtcagagctctgggcactgtccctccttgtgtgggaaactgtctgtgctgggcttcagtcagagccaggagtctagtcctagattcagttcttacctgaaagggggagtgtagattgagagagtctagctaaagacagtaaggaaaagacagagatacaggatagagtcagaagggcaattcagcgaatactgaatgccccatattaatttttcaccagtcttaaataccttaaccaaaaagcagaacatggtatcatacatgaagaacaaactgacttgtcttccttatttctccaaagattcaacttcttattacctggtcttgatgttcaggagtaaccacacctcagaccatgtctgttgttatttagataagacagccaaggccaagattgaacatcctagtgtagccatgcctttgacatttaggtattatgacttactgaggacagttttgaactctctgcccttgagccaacatgaagcagagcaatctttatgggaaccgacatgcctgcagaagaaataaccagacacagtcaggagactgacagctgtgactggaggagaaaccatcagctcagcctccgccccaagtgccgccccaatttttccctcacatcctgaccttcagcagggtcacagtctccttttccacctgtgagaagaaaagcagtgagagataagggaagttctggttcccagaatgttttcacactgtgactgcagaccagggaagggtcaggggcatgaggaaggaagaagctatgcagggaagaaacaatggcagtctgcaggtctgtcctcagcagggacttccccctgtcctttgaaatcaggtccccatcacttccatcttcagggtatgagcatttccttctttttccatgtactttagagtaggtgattgtcaacatacagacccagcgatgggcatgggtgtgctagtgtgtgtgtgtgtgtgtgtgtgtgtgtgtgtgtgtgtgtgtgtgtgtatgtgtgtgtgtgtgttgcttcccattcactattcatccttcctgaaggtgctaaattaaaataactacaataacaacaaaaccccaaacaaaacagaccctgccttccacacctgtgttctttctcatccacatcataaaacctccaatgatacaaactaagatcacagctccgaggacagcaccaacaatggtcccgatggtgatggttgactgaggaggctctgggagtgaagggagaggaagagaagatgagggtcatggtttagctgtcaaatctgaccctgcccagggtctacaaaatgcttcagctttctttctttcattctttttttttaagatttttatttattatgtgtacaatattctctttgcatgtatgcctgcatgccagaagaaggcaccggatctcattacagatgttgtgagccaccatgtggttgctgggaattgaactcaggacctctggaagagcagctagtgctcgtaagcactgagccatttctccagctccacttcagctttcttgatcccaggtctgcaccgcatttctccttaccccatctcagggtgaggggctcaggcagcccctcatgctccacaaagcatgtgtaattctgctcctctccaacaggcacctccactgctgcccacttctggaaggttccatcccctgcaggtctggtctccactatctccatgtcctgtgtcaattcttcctcatccttattccaggtcagggtgatgtcagcagggtagaaccccagggcccagcatctcagggtgactttaccatcaggttttgggtgatgggtcacatgtgtctttggagggtctgaggagaatagttggaaagttcaggtgttttgcaggggactccagcagggtcactgtgaccatcttggggtgggtcagaaatgaggtgagggaggggtgaaaaatccctgtagcttagacacagggctctggataatctcatctttgggaaattctagatatgggtgagagagtccaaggtcacagaactctggtgtcacatcaggaagaagggacttctgttcctgactgatgagtggggctgatggatacagcatcactgaattcagactccagagaccttgagtgtgggcagagaactgggcctgagcaaggatgtggcccacacaggactgcagactgatggctaactgccttggttatttcaggaaccttctctccttaccttctgagacacactctgaactgttctgacagaagggtgagccctgggagagtcagtccccgacaaagggtcaggagaccctatagaactttccacttctcatatttgagagataagaggacaggtggatattatgccaaaaggagaatcacccagagtttcctttaaagccaggaaggagacaagggtgaacactctccaccatcatatttaatacagtgatgattttatataagctatcagaaataggcaaactattggcataaaagggatcaaagtaggaaaggaagaagtcacactgtccctatttccagacagcttgattatttccttaaatggccctgttgagtcctcagcaaaactcttggatctaatgaacactcatggttgccagacacaaaatcaatataaaaagtagacttcagttatcccagcattgtattttcagaaaaataaattaggcaatgtacaacattcaaagcaaaaccaccagaattaagtggttaaagatatatctacccaaagaaatgagagagctctcaagtaaaaccttcaagatatggacacaggaaatcatagaagacaatgatagaagatgcaaagatgacccatgctcctggactgacagagttgatattgggaaagtggtcatactactcaaattaatgtatagatataatctgcaatacttacaaaactgtgatatattgcatagctttaggaaaaaaggaagagaatttgtgtcaaatgagaaaagaccatgagcagccaacaatcctaaggattaaagtcactgctggaggctgggcagtggtggagcattcctttagtcccaggatttgtgtggcagaggcaagtggacctctgtgagttccaggcgagtcttgcctacacagccagtaggacaatgacacagagaaaaactgtcttgaaaaacaaaacaaaagcacactgctggaggattgcactctaacctcaaattatcctgtgtagctagagtaacagagcccgcctggaactggcataaaatagacatgaaaataaaaggcatagaatataaatcctgcattataattcaaagctatgcatatttgattttcaacaaagaatgcaaaacacatattggaaaaagagcctattctacacatgatactgcaacactgtgcttttttattaacctaagaatatgaatttagattccaacctcccaccttgtacaaaagtaaacttgaaatacagcaaagacctcattaagttcaagactcgaaacacccagagttcaaacagacaacctaagggaaccccttctagatactggggtggacaacaacctcagaagaggacaatagcacagcagctaatcaggccatgcatcagcatgagagaagtctcttcacagcacaggacacaatcagcagatggaacagaagccacaataggagaaaccggtaccagctggactacagacaagggactagagcccttagtttacagagaatgcagaaactaacattgtcaatcaaccaatggtcaacagaactgaatagagagttgtcttaataaaggaaaagcacaaacggccactaacattttcagtgtgttcagtatgtctatcctacattgactaaactacttagaagggctggagagttggctcagaggtgaggagcacttgatgctcttatagaggacctgggttagatgcactgtgactccagttccagggaatcacacacactgctctgaccccagacaccagttacacatgtgtgcacatgcacacatgcagggaaaacactcatccccataaaagaatgaaataaaaatgaaagttaaaactgctttgtgatagcacctcacccagtcagaatggctgtcaccaagaaatctgacagcaaatgcaggagaggacgtggagagagaggagccatactcactcctgtgtgtgtgtgtgtgtgtgtgtatgtgtgtgtgtgtgtttgcacgcatgtgtgagcgcatgagtgagcaaattaatacagtcattctggaatcattttgaacagtgcaggaaaaaattaatcacaaaaactatcatattatccagctattttattcctggccagaagtccacaacctactggtgagatatttataccctatggttattgttgatttattcactaaaaaattcgatttaattcatcaacagtcatgtagataatggaaatttagtacacatataaaatgaaatattatttgcctcaaaacaatgtaatcacataatacacaggaaaatggatgaacttaccatgttctatattaagtaaggtcacacagttgcagaaagaaaaattactttttctttcctcatatgtagccaacaatatatatacatatgtaaataagtgtacatgtgtctatactataacatgaccaaaagacaagaaaggctaaatattggggatgagaaaggactaaccaccggttctgagttttaatataaagctaattttttttttttagttatttatctctcatgggttttctttcttcgtttcttttgcgtgttggtgatagataagtgcatggattatatttgctaaggaatatgtaaaatccaatgtgaatctccacaagttcataatggctaaaccaagtatatatattcgctgagacgtataacgtttgttctggttaactttttttttttttttttcgagatagggtttctctgtggctttggaggctgtcttggaactagctcttgtagaccaggctggtctcgaactcacagagatccggctgcctctaccacccgagtgctgggattaaaggcgtggaccaaaaacgcccggcttgttctggttaattttagagcatgacttattctgtaagaaagttaaaaaattaaaaataagtacagaaagggatggattacccccagctgaagggtctcttcttcctcaggactgagcccagcccaagggcagagggaggagttgcccgcaccccctgcacctgtgcgcagcagctggtccttcccgtgctccaggtgtctgtggagccactccacgcactcgccctccaggtaggctctgtgtctctctgcctcaccagtctgctcccacttgcgccaggccatctgtgcctccgggtcagcagcggtccacgtcctcaggtcgtcgttcaaggcgatgtaatcgttgccatcataggcgaactgttcatacccgcgctggaagcgcccgttcgaccccaggtgacagccagacagatgctggaatgtgtgagatcctggtggggggggaggtggggagcaaagtcagcaccgacagcctgcacctctgcgggggtcacctccgcctacgtgtcccgccacaacatcatctgggcctctcggctccacccaccgcgaccagctcccgcacctgtcctgcccattgtccccgcccacccttggactcctctaaactgaaaagaaacgtgggtctctgtccctgtctctctggtccagagtctctgcgggtcgcacatttcaggaagaaactcagacttgagacccccaggacgacttgggaccccataaatagggacgtgaaggtcatgacctccacccgagttactcaccgcccttgttctggttgtagtagccaagcagagtcctcagtttccctcggaaactctgttcaagttccttggctttccgcgtctccctctcccaatactccggctcctctcgctccatccactgcgcccgcggctcatatctcggattctccgcgtcgctgtcgaagcgcacgaactgcgtgtcgtccacgtagccgacggcgatgaaccggggctccctgaggctgggccgggactcgatggtgtagaaataccgcagcgagtgcgagcctggggacggcgcgcggtgagaccccgaccctcctcccgggaccccgggcgggtgcgcgggccgggaggggagcagggcgctgggatccggacgcgggtggggaaggggcctttggatgggcgatgcggggacgtggcttctctggtgccgcccccgccctccccccactcacccgcactcacctgcaccagtctgggccaggcccaggatggccgccagccacaggagggcacagagcacagggatccgcatcttcagggttagggggagacaaagcacagccctgtatggtcatggaatttgtaatttgtcttcacagagacttctctcctgtttctaggaacacattctcatggttttgagattgctgttgctctgggagccaacttgaaagccactgacagaccaggaagggataggaaaagccaacacttcccaacccaaaccccaccttcagctctttaaccctaaagcaattctgaggactttgttctgaatcctcccactgttcagagtcccatgtttaatactgtctccctgaaccctgccctgatggtaatcccagggaaaccatctgcatgaacacagctgttttcctgactatcccaatccccaaatctcagtgatggcctagagctggtcagcaatgcagtggagagatggtttctcttgaaagtagaggctttggcctgcaagcaccacacaagactcccacagaccaggatcctgtgttcccctgcagtgggagctgacactgccaaacctgactggttaggaatctgagttctccatatgtgaaggaatgggttaaacagtcatgtgctagacccagagtctcctagcgtttcttcccaggtgatgcctccctggccccagttgtgttttaggatgatctttgtgtgaaaccagaccacagctgtccccttccctgcagtgcctggatgcagcccagcactgaaggctgcccacattccacgagttactgtacagacactcctatgatctggtttaattaataaatgggtcacatgaagaagtgagcaattggtgctggagagatggcttggtggataagagcactggttgctctcccaaaggactggaattcaattcccagcatccacatggcagttcacaactgtctgtgaccccagttccaggggatccaacaccttcacaccagcgcacataaaatcaaataaattaaaagaaagaagtgaacaatttcacaaagcagattcttcccacccacaactgtctgtcctgcactcacacttgcggtgatgagatgacacacaagctgaggagaggagaaagatggatggtgcctggtggggacagcggctctgaaaactgagtgggtcctgagtacctcagccctgtgcagtgtggacaggggaggacactgggcagaggacgactcttatgccaggtggcatagactggcaggacagagatgtcattagacagaagggtcacaatctaaataaaatgtaatgtcacttttatatgtcatgtgtgatttgttattttcagttaaaccaagacctcagttaaaccagggtcactaaaactgtggaaagtggactccatgaagacacaggtcttatccaggatacagacttctgggattcacaatcaagatgaccagaatcctgacccatcttcctgaagtcactccatgttgtcactctgaactactatgactttcactgctttcctcctatttctgtccccagctcctgccttctgcagaggccatgatctcaaaccacacagctcagcccttgaggatgatgctgatacttcctgccctgacaactggccatgcagactgcactttctcagccactgcacttaggacggagttaacaatttcctccatagacactttttctttttttagtgttgctgtttttatttatgtattcattcatttatttatgagataagttctccctaggtagccttagctaacctggaactctccatggagactaagctggcctggaaactgcttgctagtgcctcccaagggctggcaaaaaaggcatgcaccaccatacccatttccacacacgttttctgtggaaaactctcagggtggacttgtgccttcctacacctcatggctgcatggacacaaatgtcctttcttcatgtcttcttgccagtggagagcacatcttgccaaaggtaggttttttgaacaaactcctatgttgtattaaggccacaggaaattccacactgtgggcactttcatcatgccagcccacacttctgttagatgaaaaagaccccccatctgacactccaattctagggccacatacagtgcctcaggcaagtgctcttgtcatgtctgaaaaatctctaataaaaagtgttcattcaatccatcagaacgcttgctagtcctgcccctcctgtctccttaagaagactctgcctcctctcaaccagctcttcacagtcctctctccaaccaccaacagctgtcctaacaggctccttatatgggttccatctgcacagggaaataacagtcctggcaccccagagcctgagtcttggcttcttgctgcagcttcctccctttgcagtgtggcttcctgccctgtcccctaactccttaggaacattttcctgtgtggctctaatgtctgccatgtcttctgtcacatgggaagatgttttcacactgtgctcctcagtcctggtgtccagctgcctggaagaaccagctccttctgctgctccttgatgaggtctctttatattaagagctgttcatctaggcctctcttagtcttcttatgcttatataacctcatgcacatgcatgcacgcacacacacacacacacacacacacacacacacacacacacacgttttcagcatggcagcaccaggtcccctcacactgaggtcagggtcgcctgagctttcccctcagcaaagccctcccctctctctccccacctgcctttctgtctgtgatccatgatcatattttttaattcattcaacaaaaatttattgggtatcaatgttttcagagtccctggcactggaagccatcgtccctcacaagacaaagatggcagcaccatgacagatcatgacctccttggtcatcagacatctctgctaaggctcctggagctcttgactcgaagtcagaaggctagaaaagaaaacacaggggtcatatcctggagcaggggatgaagtaatttccatctttgattttcccacaacctatttttaaaatttactaattttacatctgtatatttcctagaagagaaagtgggaagtaccttgaatgaattggtacaggagaccacttcctgaacataacaccagtagtacaaacactgagatcaacaattataaacagaacctcctgaaactaagaagcttctgtaaggcaaaggacatagtcaacaagataaaagggatcatgtcttttaaataaacatccatctaaagtagactcaacctgtcaatactgtagtcaccactgggggcagcaccaggattcccagagccagaaacggggcggggaccttgggtagaaagcaacaggacaaatctgagatgagaccctgtagatccctcctctctgccaccgtacaactctggttaaattctaaatgatgggaaagaaggagagatcctcaaaggaggggtctggaaggaggcaggagctcaggagtctgaagttcatgttctcaggccacagtctcctgagtgcaggggcctagttgggtcctgatgggaaaggatggaattgaaaaccacattttaatgctgtcactcagggagcacaagggataaggaatcaggctccacttacaggaacaaaaacaggcctagtcctccatacaaactaaaaagtcaacaataaacagagaagactggatgaagagctacaatcaggtcagtgcccagatgacctgtcccctggctgctcacaattctggggactggacaaggctctggccatgaatgtgtccctgtgtttacagatgtgagcatgtggttctaagtgatgaagagaacacaggtagcaggtgacagagctgaggagtgaccatgtcacagccagcaatggactgagctccacctgggcacagccctgttctcactcagctcccacaaactcatcctgtgtcaccggatgcacacagcacaatgaacacagattctggaaggttctccacactgccatttattcgcttctcaaattctaagtatcccaataatttatttaatagacaatcaacctgtcagatcaagaacatgaacaatcaagttcaaattgagatccttattttcagtggggatttgaagggctgaagctcagagcagcatggaggtgacaggaaatgtcccctcttgtctgctgcaacaggaagggttggttggctgtggaagggaacacaggtagtgcagggacagggtcctggtgtacagggctgggctgggctccacagttcttcacattgagcccataggatcacagggaacatcagacactgttgctgagagtgaactgaggggtcctggatatcacaggagagggctgaacacattgtctgtcactccatccatgccaggcagttgccttcaccctacagaacaagagtcatgaacattcactgtgaagacagcataccaacaacccatcactcactcacaagttattctgggagtccctgaaacccaatcatgtccactttgcctcccccagtaggtcccagagtgtcacctttacaatatgggaaagacacatctgagctctgggaactgtccctgcctagtgtaaacacacacacacacacacacacacacacacacacacacacactggaaggtaaaaacatgaacgctagaagactttgctggaggagctaatatgggttggcagagctctgcaaatactccaggtccatccaaagcctctcaaggacaatcctgctcccacacttacctagagctggagcatagttccctcattgtccacctgtgagaagaaaagctgtgagagaccagagaggagcccatccctaggaaatttccagaaccaacaggagacccaggttagagagaggagcaaggtgggggtgtgtggatatgtttccatgaggcagagaacacttctaaaaggggctgagagagaactcagaccttcccttttctacctgtgtttctcctcttcctcaccacagccaccacagctccaatgatggccacagattcgaggagaaccagaacagcaatgactgccatgatggggacagtggactgaggaggaggttctgggaagggaaggacaggaagggaaggtgagggtcatgaccccagctctcagccctgaccctgctcaggctctgcagaaggctccagctttccctgaccccagctctgcacccctccctccttaccccatctcagggtgaggggctcaggcagcccctcatggtgcacatggcatgtgtatttctgctcctccccagaaggcaccaccagagatgcccacttctggaaggttccatccccagaaggtctggtctccaccagctccatgtcctgagtctgttcttcctcctccaacccacggccacacctggagtcaaatctaacttctgatatctttctcactgcatagattactgtgcaaactcaagacctaggaagcctctgacttcctgaaaaactaagacccttgggggatctgtgtggaagatttaagaaaccgcacaataacaagataaactgaaatctgcaaatacaaagttaaatcagtgatgacacttaattatgtgtctgaacacttctgactgtcatcacattagtgacctgcaggtggcggtggtcccctcatcacggatatgcacatttccagggggacccagaagctaagagggaatctcatgaaccagcaggtcacacggtcttccctatgtgatgttctatagcataagttaggtggtaaaagtattgaagaaggaatgaaaaataattaatttatatacattattaaattcatatcaaaataagaaattaggggcacaggctacaaaacagtgccaccagttactgctgctacagttgagggacaaccactgtggccatcttgctaaccagtataactgtctgtccaagagaacagccatcaccaaagtgtgcagtagaacctctgacactcaggcagagaaaatgactccccaaaccctgcctctagggaggacaagatacaaggtgttgtcacccaggatctctggaagtgtgctgtggatcccagtgcagcactcactgggacacagcagtgctcacaggggtgtgtggattttccctgtccttccagtccttgaattctagaagaccctgtctttgaggaagttaaactcctaattcactagggcaacagtgtaactcctgggcctgagggagagcagggggctctggatggttaattctggcagaaaatagtctaaggtcatgggactctttcgtttaaagcaaacactgacttaacttatgtaattatccagagcatcagtcccccatggcacctgtggagactgacacccatgatagtacaaggggagggaaagaagcagtatcaccataacgaggaaaaaaaaaaaactgactaaaagtaaaatggcaacttcaaaaaagaaaagaaaaagagcctccccccaaaacacgcaatttggaatcctcccagagcaccccttaaatgctgctgtgaccattctaggaagagattgaaattgcggtgtgtgagggatgcaaacctcacccacaggaatctgggataatgtattttttggaaagttctagaaactggggaagcagcctagagtcggggcatccatgtctccatcaggtaaaggagactttctgtcctagactcagacactgggtgtgggcagagaacccggcctggcagaggccatggctgacagagggctgcagactgaggagccactgctggggatgtgggcatcttctctcccgccctcctgagacagatctggaaccgtccagggagaaggctgagccctgggagatgagtgcagcccctgccaggctggatcaggagccccagggtcactgtgtcccctcagagacaggggcatgaccccagctgagggtctcttcttcctcaggactgagcccagcccgagggcagagggaggagatgcccggggcccctgcacctgtgcgcagcagctggtccttcccattctccaggtatctgcggagccactccaagcacgtgccctccacgtaggccttttcattctctgcaaaaccagtctgctcccacttgcgtcgggtgatctgcgccgccctgtccgccggtgtccacgtcctcaggtcctcgttcagggcgatgtaatcgcggccatcataggcgtcctgacggtacccgcggaggaggcgcccgtccgaccccatgtcacagccatacatcacctggatggagtgagagcctgggggtggggggaaccaccgggtcagtcccactcagctgtccagccctggggacatcggcccagcgcccccgctcactcgtggatcctctaaactgaaagggaaaccagattccggttccagctctcctcctcccggacctcagacctgggacccggggcgactttggaccgtacatatgttcgtggaaggctgtgacctccgacccagggtcactcaccgccctcactctggttgtagtagtcgagcagggtccttagattccctcggtaaatctgctcgctgattttgacaaaccgtgtctgcctctcccaatgctcaagtccctcccgcttcgcccacgtggtcagcggctcatatctcagactctccgcgtcgctgtcgaagcgcacgaactgcgtgtcgtccacgtagccgacggcgatgaaccggggctccccaaggccgggccgggacacaatggtgcggaaatacagcagggagtgcgagcctgggggcggcgagcagtgagaccccgacccttctccaggaccgcgggtgggtgcgcgggccgggaggggagcagggcgcggggctcgggacgcgggtgtggaaggggcgggaaggtctggctgggctttgcgggacgcgcttccctggtgtcggccccgccctctccgcagaggccgtttccctccagaccctgctctcacctgcgcgggtttgggtcagggcctgggaggccaccagcagcaggaggtcccagagcagagggctccccatcttcagggttagggggagacaaaacacagccttgaatggtcgtggactttgtaaatttgtcttgacagacttctctcctgtttctaggaacccatggttctcatggttgaggttgttgtctctctgggagccaacctgacagccactgacagaccaggaagtgaaaccaaaagcctacacttcccaatcaaaaccccatcttcagctcttagatcctgaaaccaattcttaggacttgggactttgtcctgagtccttccacctggcattattcctgtgtatgacaccgtctccttgaaccccttcccagagtctgtctgatggtaatcccagggaaactatctgcatgaacacagctgttttgctattttctatcccaactcccaaatctcctgatgaccccgagctggtcagcaatgcagtggagagatggtttctcttgaaagcagaggctttggcctgcaagcaccacacagactcccacagagaccgggatcctgtgatcccctgcagtgggagctgacactgccaaacctgactggttaggaatctgagttctccatatgtgaaagaatgggttaaacagccatgtgctagacccagagtttcctagtgtttcttcccaggtgatgcctccctggccccagttgtgttttaggatgatctttgtgtgtgtgaagccagagcatagcttcaacactgctgtcccctttccctgaagcgcttggataaagcccagcactgaaggctgcccacattccacgagttactgtacagacactcctatgatctgattcagttaagaaatcgggatcattaaaaagtgaacaatttcacaaagcaggttcttcccacccacaactgactgacctgcgctcacacttgcggtgatgagatgacacatgagttgatgagaggaggaagatggatggtgcctggtggggacagtggctctgaaaactgagtgggtcctgagtacctcagccctgtgcagtgtggacaggggaggacactgggcagaggacgactcttatgccaggtggcatagactggcaggacagagatgtcattagacagaaaggtcacaatctataatgtaatgtcacttttatatgtcatgtgtgacttgttattttcagacttcagttaaaccaagatcactaaaacggtggaaagtggcctcagagagccagatcttatccaggacacagccttcttggattcacagtcacaatgaccagaatcctgacccatcttcctgaagtcactccatgctgtcactttgaaccactatgactttcactgctttcctcctatttctgtccccagctcctgccttctgcagaggccatgatctcaaaccacacagctcagcccttgaggatgatgctgactcttcctgccccaactcctgccatgcaggctgcactttctcagccactgcacttaggccccaagttaacaatttcctccatacatagtttttcttcttctttttttaaagatttttatttatttattatgtatacaacattctgcttccatgtacatctgcacaccagaagagggcaccagatggttatgagccaccatgtggttgctgggaattgaactcaggacctctggaagagcagttggtgctcttaactgctgagccatctctccagcccccccccccagtttttcttcttaattgttgtttttatttatgtatttactcatttatttttgaggtattgtctccctggatagtcttatctgacctggaactctccatggagactaagctggcctggaaactgtttgctagtgcctcccaagggctggtattaaaagcatgcaccaccatacctatttccaaacacattttctgtggaaacttctctgggtggacttgtgccttcctacattctcctggctacatgcacacaaatgtcctttcttcatgtcttcctgccagtggagagcacagtcttgccaaaggtaggcttttggaaccaacccctatgttgtatgaggccacaggaaagtccactctggtggcactttcatcatgccagcccacactcctataagataaaatggacccgcctctgacagtctgattctagggccacatacagtgccccaggcaagtgcccttgtcatgtctgaaaaatctctaataaaaagtgttcattcaatccatcagaatacttcctagtcctgcccctcctgtctctttaagaagaatctggctcctctcgaccagctcttcacagtcctctctccaaccaccaacagctgtcctaacaggctccttatatgggttccatctgcacagggaaataacagtcctggcaccccaaagccagattctggcttcttgctgcagcttcctcccttttcactattgcttcctgccctgtcccctatttccttaggaacattttccctgtgtgaatccaacatctgccttgtcttctgtcacacgggaagatgtttttacactgtgctcctcagtcctggtgtctagctgcctggaagaaacagctcctcttgctgctccttgttgaggtttctttacattaagagctgatcatctaggcctctgctagtcttcttatgcttataaagatgcatgcacacaaactcacacctgccttttcagcatggctgccggcttccctttccagcctcattgcttcctgtggtctatgactctgtgagcatggctgtctctttctgctgtcatgtaacggtttcaactgctgctcaaagttatcctcactttcccaggatggatgtggtagttgtggctaataaacccagaaacctctgtcattttcaaggcatccttggagtccccatcaacacagagatgtctgaggccagactggaatttcccctatcagaacccacggccacacctggagtcaaatctaacttctgatatctttctcattgcatagattactgtgcaaactcaagacctaggaagcctctgacttcctgaaaaactaagggaagaattcagagacctccagggagttcagcatttcacccaggcactgttgggttggcaggtgctgcaggaagcagaggtgctggtgcacattcaggacagagaaaacccatgtcctggtcaggactgaggtgactaacttctgaggccctgcctgctgctgtccctggctgtcttcaaaggtggggctggccagcagcctccttgcactccagcactcactcttacagtctgcagatctgctgagtatgggtcactgtgtcacaccaacaggccacctatcactcagaaacctctctctggattccttggtgttcaagcttcactccaagggctacagcctgctcagggcagcagcatggccacaggctccagaccagccatggctcaccctgacaatgggggctactgagagctgagagctgcaagaggaaaggcaccaagaaggcagccaggatgacaagaggtgaagtcctccctcctgtgaactttgacctcagcttctgagtccttgtcctcctctgggacagctacaagtcttcagagtctcctgtgctcttgttgtccacaggcagctcctgcagctggatgtcctggagagattcagccccctgcagactgcactgcacaaggtggactgttgatggccttttgctggcttggtggctgtcttgaagctgggtaggagcaaatggtgccagcaggcctgccaaggagtctcagggacatcatcctttcacttgctgaaattgctgggacccagggctgggaaactagtgagggtgagttcagtagatattcttcctggaggaacagcccagggtcccctagatcacagcaaactgaattcaaggagttgagggaagtggtctctggcttgggtcttatgcaaaccagggaatggaggccctcaggtcctctggattgtacctgtgcctgtgttgaactcattcctgtaccaggcagttctaggtggtcctgatcctctctggctttgagatgatgtctcagcacaatgtgggaaaagttgaagccacagtggcaggtgggcttgtggagtaggggtggagcttgtacaaccactgtcttggcagctcctgtatccagtatctgagatggcagtttaggcactggatgcagctggtgccgcccaagcacagcaggcaactcagaatggagtctgtttatcctgccagctgagagccagtcagaggtcagctcctggaagggtggagggtagatgttgcctagagcagccctgtgacacaggatcaggggaccttggtgatgagtccccaagaaccaggaagagcaatatcccaatgactctgaggctgtccatcaggtgatggtgctgctggccttactctgtgagaaagcacagagctccaacataagaattcacagcaaagcttgtctcctccacccagaaccatgaggctttctctcctttagttcattccagaattcagtgtaccaatatgatggcttcaagcaactccagagatcaggggtcctggttgggctgccaatgctgcaccaaggacatcagcttatctcccagtgagctcacaatctcagagataactgagccacctgctgctgctgctgctcacatgagccagccagcacagtttttgtattcttgatgtcttcttggtggatgtctaaagcaggggtcttgctccagggacccaagtccaaggcctataggtttgagtgtcaggtgctgggacatgccatgctggtcccctcttagtcccctgcccagcctgtccacacccctagtagccagtcatgccctctgggagcctccagggccacagctttagattgggtttctggtgggaaagatcagggtcctggaaatgtgaattgccacagaaaggccaaaatgtcaggcagcctcaggggcccaaatggggtacttgggctacactgcacctccttcacctcctggtgcctggtctgccccaaggccacccagttgtctgctgtggtttccattgcataggtgttggctgggcaacctggatgtgatagctccattgggggtcagcaagtcctttgccaggttcctatttaaatactgaaggagacattgaagttgtgagtattcctaggctgtcctgtgatggctccagatgtgtacatggtctaaatgggaatgaacacatctcctcaaaggtgtgtgctttctgtggtgaaaacatttaggatcttgtcttctagctctttgaaagttataacctgttgtggctttgtaagtaaccacaccttacagctgccccttatctcctcacccctaccccaactgcagccacttgtcagccactgtcactcccattgtccctttccaatgtgtggttgggtccaaggatctgtgaagctcaagtccccattaggatcctcaagggcgtcaaggtgtggagcccttgacaagacttcctggagttgcagtggctttttagtttcctttttagtttctgttttttttttttacttaaaatatataattttattattaattttcaaatttgagaatttcattcacatatatagtatattttaaagaaattcacccccaattcccttccgttcaactcatctcctatcaactccaccacttttctttcccaagtgcatatgctggccttaaaaaatatatttagtgttgcctctcggtgcatgagtctagaatgacccactagagtatgtgtagcctctcagggaccatatcccttgagaaaactgattcttcacactccaaagagtcataagttacctcctcattttgtttctgtgttgatacaggatatttctatgtatccctggctctgttctaggaactcactatgaccaaagtagcccaaaagttagagattcaccagcttctgcctcccaagagctgggattaaagatgtgcattgaattttcttacagctttcctctcagagcagtaggacagacctcctttcctatccacccagtgcggtgtctctggaccttttgtcccaaactggcacacctgagacattaaggaagaagtactgatgggggatgtttctctttttggttgatgaataaaaacactgattggccagtagaggcaggaagataggtggggataggagatgaggagaattctgggagacaggagagagagaccatgaaaagaagccatgttgctgaaggagtaacatggtgatttatgggtaagccacaaccttgtggaaatacttatattaatagaaatggattaataattaagaaagagttagccaataagaagccctagtcatcggccaacagatgagtataattaatatagggcttgtgtgtttatttagggctgaagctgctgggggaaagaaaccttcatcttcaaaacgcctgaataaaatctgaataagaacaggcctagtcgttcaaggatgacctgtcacagctgccctggctgctcctaatttgagggacaggacaaggctctggccatgatgatcacagcctctgtcagcacgtgggtctcctgagtgaagagaagaccagagccaggaggcggcagaggtgaggagtgaccacatcaaaacccatagcagactcagctgtgcacagcgctgttcacactcagttcccacagcctcatcctgccccactgcacacacacagcacagtgaccacagattccaggaggttctccatgacatcatttatttcctccacaaagctgtatgaaatcacctctttaatttactcaacaattaacactcagctgaaggattggaaccatcaagttcacattcagtttcttattttcagtggggaagtcatgagctgcagctcagggcagcacggaggtgacaggatggaggtgtcccctcctgtttgctgaataaggaaggttggttgtgaaatggaacacagggcagtgtagtgacagggttcttgtgtgcaggggtgggatgggctccccagttcttaacattaagctcctgagatcacagggaacatgagacactgttgctgagagtgaactgaggagctctggatgtcacaggacagccctgatgacagtgtctgttacacagtaaacaccaggcatcagtcttcacgctacagaacaagagtcgtgaacaatcactgtgaagacagcatcccaacaacccatcactcactcacacccagcttaccccatcccagggtgaggggctcaggcaacccctcatggtgcacacgacatgtgtatctctgctcctccccagaaggcaccaccaccactgcccacttctagaaggttccatcccctgcaggtctggtcgccaccatctccatgtcctgtctctgtgcctcatccctcttccaggtcagggtgatgtcagcagggtagaaacccatggctcagcacctcagggtgatgttatcttcaggtctgtgatgatgggtcacatgtgtctctgctggttctcaggagaagagttggaaagttcaggcattgtgcattcttcatggggactgcagtagtgccaaagagaccatcctgggaaaggtcagaaatggggtgataaaggcgtgaaaatccccagcagtatttcacagtatcctggataatccctttattatgaagttctagaatctgagtgaaacactctagggtaggagactgtaggtgtcccaacatgaaaaggggacttctgctccggactggggagcgcttagtgattcagtatcactgttttcagactcccatgactgagtgtctgcagaacaccaggtctgagagaggtcatggtccccaatggatcacagaatgatggaactgggcttgtttcaagatcttctcaccttcccattaaaaaggattctgaactgtcctcagaggagggtgagccctggagagccaatctatactcaggaattccatatgtggctcagcattttgtcagatacctttataccagcccaggcaggtggatctcttcattttgagcccatgctggtctaaataggaaattacagggcacccaggagtgcacagagagacaccatcaaaagcaatacaaaagaaacaaagaaaattcacaaaagaaatccaggaatgctctccctgtgtcttgtggaagacagtagtgatgatgcagcattgtatccagtggagagaaacagtgtttcttctaccaccaggaatgagctgaggatatcaactctctgctctatctgagactgtgtttgaagactcagctattacaatcagataagagaaagtcataaaaaaggaggaaaacaggaaatgaagaattcaaactatcccgatcgctagacaagtttcttttcttatatgctttgattgagtgtattgcaaaactcttggacctaatcaacacttatggttgccagacacaaaatcaatataaaaaggtagccttcatttatgccagcagtatacttccaaaaaaaacaaaaaagaaaaagaaaaagaaattaggatatgtacaacattccaagtaactccagcagaattaattgtttaaggataaatatatccaaaaaacggaagaactctacaatgaaaactttaagatctgacagaggaaatcatagcaacaatgtcagaagatggtaagacaatccaagctcctggattggcatagtttacattgtgacaacgaccatactaccctaatgaatctacagatttaatgtaatgctatcaaaattctgatgtatttcacatttagaaaaaaatacaaaaaatcacatgggatcacaaaagaccacaaatagccaaaaaatctgaaggattaagaacactgctggaggttttacactcctaacctcaaattctactgcagaattataaagacaagacagcctgtttgtatccagtgggcatttgctctgcccatgaccttgcgctatctggggatagaggtgctttctctgtggtggtcagagattggactgctggatccattcatccccggggcagaacagaagactgaggcggcttgctaccttgttgcgttttcgtgagtgctttctaataaatcctaaataacgcccttataccagctatcctggatttgcctacatttggcgcccacgtggcattagcctccagcctccacagctgttggcaagcttctcatgcccactgaggcctaagctttcccatgtgggattccccgggattccgtctgaccagtgcataggctccacccccctgccctgtcgcctcctgagagccattgggggccagcagttagttgcaggctacagtgtgaatcccgtcccacaacaggtccaactgagtttaacccaactgctggtgcattcctgtccctcctctgttccctgtcaggaaggtctgtgctcacctgcccgctttcctgccctgacccctgcctggcagaggctgcaggctaccacagacttggatttaactgctgctaggaggaaactgcctggcctagggctgaactgcaccacacccagttccacagcctctgagatgcttccccagggcttattctgctagagcttgagctgtggctgccagccacagggtcccaggtcagcataagctgcaagttgctctttttcttctaactctgtgagcccatgtcagagaggatccaatacccaagtatgtaaaacatacttggggaaaatatgatgctgcaacactgggtttctacctcaggagatgaacttcgagtctcacctttcttttctttcttactttcctttacttgctttttctttgttttctttccttcctcctgttatggtggaggttccatccaagacccctcccccatctccctccaaactctgctgcatctcagaaagcctgccaaatgatggtccctaccccaatgatactcaagaccactcctacagggtatttaaactgccccccagagaacggactcttggtttttctggtcttcttttccagtctcctctctggggggctgaaggccacccagaagctttgtatccattaaacgtgggcttttcctaattgggtttgatttggtctgatttggagtgctgcatgggcagagaggcttatccaggtgtagacaattttcaccttccattcttttttgaaacagtgtttcactgggtaactatgtctgtcctggtactcagtacattaggctgacctccaggtcacagagatccacctgcctctcccttgtgggtgctggccttaaaagtttgtgccatcttttaccttccacaaagatgaactcaaaacagagcaacgaccttgcctttttttcaagatatccatgttattgtgtattgtaaaatgcccattggctgaacataatttattcataagtgaccactggaaaagcaaaagcaagatcagcaagttgaaggttgaatttacctgatagacaaaaatgctaatcagtgtctaattattaaacatgatagtaaatacaaataacagtttcagaagagtagatattatatgtaagactgatacaactattaatggtgaatcacattctttttctaaaaaaaggaaaatttaaattctgtctcatgtcccaagggttgactgatataggacagaagaaaaccaaaattaagggattattgcattgtcaattatctcataatcctttggttttattttgaaataaagtagcttcctgtacttgtttttgcatttgagactgaggcaagtaagcaggaactcagtttgtgtaacctggatttatttaacagactgtggtcctttcaagactgctgcacatggcatttagaatgcttaacttttctgcagtgaactgtcaccatcctagcagtgacctttaagatctccaagaagatgatggggcctggaaggaagcaggagcttaggagactgaagttcatgttctcagcccacactctcctgagtgcaggggcctattgggtcctgatgggaaaggatggaaaaacacattttaatactgccactcgggcaccaaaagggataaggaggcaggctccacccacaggaaaaacaacaggtccatacaaactaaaaagtcaacaataaacagcaaatatgggataaagagctacagccaggtcagagcccaggctgaccagtcacaggagccctggctgctcacaattctggggacaggacaagtctctggccatccctgtgtccaggtgatcatagatctcagcatgtggttctaaatgatgaagagaacagagccaggaggtgacagagctgaggagtgaccatgtcacaaccaacaatgaaataaatgagctccacctgggcacagccctgttcacactctgcagcctcatcttatcacaccagatgcacacagcaccatgaacacagactctgggaggttcaccatgcttccatttatttcctccacaaattcttagtgtctcaataatttatttaacagacaacctgtcagatcaaggaacaatcaagttcaaattgaggtctttattctcagtggggatttgaagggctgaagctcagggcaggatggagctgtcccctcctgtctgctggaacaggaaggttggctgtgcaaggaaacacaggcagtgcagggactgggttcttcctcagttcttcaaattgagctcataggatcagagggaacatcagacactgttgctgagagtgaaatgaggggccctggatgtcacaggagacacccgaacaccagacagctgtcttcattctacaaacaagagtcatgaacaatcactgtgaaggcaacatcccaacaacccaccactcactcacaggtgggtctgggagtcactaaaacctaatcatgtccactttgtcccaccccaaatcaggtcccagagtgtcacctttactgtctgggagagacatatcagagctctgggaactgtccctgcctaatgtaatatatatagtaatatagtaatataaatatatgaaggtaaaaacagggccccaagaagatttttctggaggaactcctatggatttgccagagccccttgaaatactacagcttcaccccataggcttcagggacaatcctgctctcctcacttacctggagctggagcatactttcctcttttttcacctgtgagaagaaaacctgtgagagaccagggatgagcctgatcctagtaatttcctggaactgacagcaaatccatgttagagccaggagcaatggggaggagggtgtgatgtgtttccatgaggcagagcacacttctaaaggggctgagagagaactcagaccctgccctttcctacctgtgtttctcctcctcttcctcacaaccaccacagctgtaatgatggtcacaactccaaggagaaccagaacagcaatgactgccatgatggggacagtggactgaggaggctctgggaagggaaggacaggaagggaaggtgagagtcatgacctcagctctcagccctgaccctgctcaggctctgcagaaggctccagctttccctgaccccagctctgcacccctccctccttaccccatctcagggtgaggggctcaggcagcccctcatggcgcacatggcatgtgtatttctgctcctccccagaaggcaccaccactgctgcccacttctggaaggttccatccccagaaggtctggtctccaccagctccatgtcctgagtctgttcttccttctccctttgccaggtcagggtgatgtcagcagggtagaagcccatggcccagcacctcagggtgacatcacctttagatccaggatgatgggtcacatgtgcctttgggggatctgtgtggaaggtttaagaaatcccacaagaacaagataaactgaaatctgcaaagacaaagttaaatcaatgatgacactgaactgtgtgtctgaacacttctgattgtcatcacactagtgacctgcaggggccgctggtcccctcatcactgatctgtacattttcctggggggacctggaagctaaaaaggaatcacatgaaccagcaggtcacatggtcttccttatgtgaggttctatagcataagttaggtggtaaaagaatggaagaagggatggaaaataatttatatatgtgattaaatttatgtcaaaataagtgggatagggtacataatgggtgctctcaactaatgcagccaccattgaggcacaaccactgtggccatcttgctgaccagcataactgtctgtccaagtgaacagccattaccaaagtgtgcagcagaaatgggatgaagctctgacagtcagacatagaaaatgactctgcggggacaagatacaaggtgttgtcacccaggatctctggaagtgtgctgtggatcccagtgcagcactcactgggacacagcagtgctcacagcagtgtgtggattttctctgtcactccagtcctggaattgcagaagaccctgtctctgaggaagttcagttccttattagctggggagcaacactctaacttggtggggttgagggagagcagtgggggtttggatggttaattctggcagaaaatagtctaaggtcatgggaatctttcctttaaagagaacaatgacttctctaattgtccagattacagtccccaagacaccggtggagacagatacagatgatgatgaaaagggaaggttgaaacagtatcaccccagtgaggaggaaacactgactaaagcaaaatgacaattaaaaaaaaaaaacaaagaaagacaaaagaaaagaaaacatattttagaagtttttttgcagggcaccccatgagtgctcacgtgaccattctaggaagcgttaaaattggggtgagggaggggtgcaaacctcacccacaggaatctgggagaatgtattctttggaaagttctagaaactggggaaccagccttgggtagggacatccaggtctcccatcaggtaaaggagacttctggtcctggtgtgtaaagctgacacactcagacactggctgtggacagagaacccggcctgggagaggccatggctggcagagggctgcagactgaggagccactgctggggatgtgggcatcttctctcccgccctcctgagacagatctggaaccgtccagggagaagttctgagctctgggagatcaatgcagcccctgccaggctggatcaggagccccagggacactgtgtcccctcagagacaggggcgtgaccccagctgagggtctcttcttcctcaggactgagcccagcccgagggcagagggaggagatgcccggggcccctgcacctgtgcgcagcagctggtccttcccgttctctaggtgtctgcggagccactccacgcacgtgccctccaggtaggccctccatccatctgcatgcaacaccagcctgctcccacttgcgtcgggtgatctgcgccgcggtgtccgcagccgtccacgtccttaggtcctcgttcagggtgatgtaatcgcgaccatcataggcttcctgactgtacccgcggaggaggcgcccgtcagaccccacgtgacagccgtacatcctctggtaggtgtgagagcctgtggggacccagcggtcagccccgcccacttgcccggccaccggctccgcccacacttggactcaaggtaaactgacagtgaaagtttcccagttgcgggttatctggtccagagtctctgcgggttccatatttcgggaagaacctcggacttcgaagcggggagactctgggacgtacctagggacgtgaaaggtcttgacctcggacctgcaccactcaccgccctcgctctggttgtagtagcggagcagggtcctcaggctcactctgaaagcctgctcattattcttggcgatccgtgtgttcctctcccaataatccggttcctcccgctccacccacggcgcccgcggctccatccttggatactccgcgtcgctgtcgaagcgcacgaactgcgtgtcgtccacgtagccgacagagatgaaccggggctccccgaggccgggccgggacataatggtgcggaaataccgcagcgagtgcgagcctggggacagcgcgcagtgagacaacaactctcctcccgggaccccgggcggatgctcgggccaggaggggagcagggctcgggacttggatgtgaacgtataagaggtgtgagggacggtctgactgtgagatgcaactatgtggcttccccggtgccgtccccgccctccccacagaggcggttttcctctcgacccggcactcacccgggcgggtttgggtcggtgccagggcggccaccggcagcaggaggacgcagaccacagggatcaccatcttcagggttagggggacccaaagcacagccctctatggtcatgggctttgtaacttgcttcgcagagacttctaagaacctgttctcatggttgtgaggttgctgtctatctgggggccaacctgacagccactgacagagccaaaagtgaaaccaaaagcctacacttcccaatccaaaccccaccttcagctcttaaaccctgaagtaattctgaggacttgggactttgtcttgactccttccactgcacagtgtatataacactgtgtatgatactgtctgcctgaaccctggcccagagtctgtctgatggtaatcccaggaaaataatctgcatgagcacagctgtttttctttcctatcccaactcccaaatctctgtgaggaccctgggctggtcaggaatgcagtggagagatggtttctcttgaaagcagaggctctggcttgcaagcaccacaaactcccacagagaccaggttcctgtgtccacctgcagtgggagctgacactgcccagaatctgagttctccatatgtgaaggaatgggttaaacagtcatgtgctagacccagtgtctcctagtgtttcttcccaggtgatgcctccctggccccagttgtgttttaggatgatctttgtatgtgtgaaaccagagcatatcttcaacacagctgtccccttccctgcagtgcctggatgaagccaagcgctgatccctgaccacattccatgtgtacagacactcctatgatccagtttaattaataaatcagtcacatgaagaagtgagcaattgggactggagagatggcttcgcagataagagcactggttgctctcccagaggactggagttcaattcccggcatccatatggcagttcacaactgtctgtgaccccattttcaagagatccaacacacttacaccagtgcacacaaaattaaataaattatttatcagaaagaagtgaagaatttcacaaagcaggttcctcccacccacaactggctctcctgtgctcacacttgtggtgacgagatgacacaggagctgagtagaggaggaagatggatggtgtgtggtgtggacagtggctctgaaaactgagtgtgtcctgagtacctcagccctgtgcagtgtggacaggggaggacactgggcaggggacgactcttaggccaggtggtatagactggcaggacagagatgtcattagacagaaaggtcacaatctaaataaaatgtaatgtcacttttatctgtcatgtgtgacttgttatttttcagacctcagttcaacaaaggtcactaaaactgtggaaagtggcctcagcagcgagtcaggtcttactcaggatacagacttctgggattcacaatcatgatgaccagaatcctgacccatattcctgaagtcaccccatgttgtcactttgaaccactatgacttgcactgctttcctcctatttctgtccccagctcctgccttctgcagaggccatgatctcaaaccacacagctcagcccttggggatgatgctgacgcttcctgccctgactcctgccacgcaggctgcactttctcagccactgtgcacccatacacattttcagcatggctgccggcttccctctcttagcctcattgcttcctgtggtctatgactcccagcacagctgtttcttgctgctgtcatgtaacggtttcaactggtacagtaaattatcctcagtttcacaggatggatttggttgtcatggctaataagcccagaaatctgtgtcaatttnnnnnnnnnnnnnnnnnncagttcattcaacacagagatgtctgaggccagcctggaatttctccctcagaacccaggccatacctggagtgaactctctaacttctggtgtctttttcactgcacagattactgtgcacactcaagacctcagacccttagacttcctgaaagactaagggaagaattcagagacctccagggagctcagcatttcacccaggcactgttggattggcaggtgctgcaggaagcagcagtgctggtgcacattcaggacagagaacacccatgtcctggtcaaggctgaggtgaataacttctgaggccctgtctgctgctgtccctggctgtcttcaaaggtggggctggccagcagcctcctcccactccagcactcactcttacagtctgcagatctgctgagcatgggtcactgtgtcagtcacaccaacaggccacctgtcactcagaaacctttctatgtattctttggtgttctggctccactccaaggcccacagcctgttcagggcagcagcatggccacaggctccagaccagccatggctcaccctgacaatgggggctactgagagctgagagctgcaagaggaaaggcaccaagaaggcagccaggatgacaagaggtgaagtcctccctgctgtcaactttgacctcatcttctgtgtccttgtcctcctctgggacagctacaagtcttcagagttccctgtgctcttggtgtccatagccagctcctgcagctggatgccctggagagtctcagccccatgcagactgcactgtacaaggtggctgttgatggccttttgctggtttggtggctgtcttgaagctgtgtaggagcaaaaggtgtaggcaggcctgccatggagtctcagggacatctccctttcacttgctgaaattgctgggacccagggatgggaagctcctatggtagaattcagtagatatcctgaatggagcaacagcattaagttccccaggtccacagcaaactgaattccaggagttgggggaagtgtcctctggtttgggtcttatgcaaaacaggaattggagaccctcaggtcccctggattgtatttgtgcctgtgttgaactcattcctgtaccaggcagtcataggtagtcctgatcctttctggctttgagctgctggctcagcaaaatgtgagacaagttgaagccacagtggcaggtggggctgtggggtggaggtggggcttgtgcaaccactgccttggcagctcctgcatcctgtacatcagatggcagtttaggcactggatgcaggtgggtgttgcccaagctcacctggcaattctttttttgttttgttttgttttgttttgttttgttttttgagacagggtttctctgtggctttggaagctgtcctggaactagctcttgtagacgaggctggtctcaaactcacagagatctgcctgcctctgcctcccgagtgctgggattaaaggcgtgtgccaccaacgcccggcccacctggcaattcttaatggtgtctgatcatccttctagttgtctgaaaactatagcttgctgtggttttctagtcaccacaccttacagctgcccatttctgcaatgttccatcccctgcagacctggtctccaccatcttcatgtcctgattctgtgcctcctcatccctcttccagttcagggtgatgtcagcagggtagaagtccagggcccagcatctcaaggtgatgtcatgtcacattcaggtctgtggtgatgggtcccatgtgtctggtgggtctcaggagtagagttgggaatttcaggcattgtgtattcttcctggggactgcagcagtgcctatgagaccagaaatggagtgatggaggggtgaaaatgcccagcagcatttcacaggatcctggataatctgtttattatgaagttctagaatctgagtgaaacagtccagggcaggagactctagttgctccttcgttaaaaaaaagggaggggacttctgctcctgactagggggcacttagctatatcatatcactgtattcagactcccatgactgagtgtgtgaagaaaacccggtctgagagaagccatggttaacaatgcgcagcagaatgaaagaactgagctttttcaagatcttctctccttccctgttaagacagattctgaagtgtcctgagaggagggtgagccctgggagagccagtttctagtcaggaatcccatgtgtggatgggcattttgttcacatgtctttaatgccagttgagtcatgaggctctcttatttgagcccatgctggtctacgtagagagtcacaggagatccaggactacatacacagacaccatcaaaagcaacacacacacacacaaaaaaaaacaaaaaacaaaagaaaatacaaaaaaaaaaaaaaaaaagatgtccaggaatgctttccctgtgtcttatggaagagaggagtgatgatgcaacattgtatccagtatagagaaacagtgtttcttctgagatgagggtgtctgttttctgctctgtctgagactgtgtttgaagacccagttgttacagtcagataagagaaagaaaaaggagcaaaacaggaacggaagaaatcaatctattcctatctttagacaacaagattcctttcttaaatgacccggttgagtgtactgaaaaactcttggacctaatcaacatttacggttgccagatactaaatcaatataaaaaggtagccttcatttactccagcagtgtattttcagaaaaagaaattagaaatgcacaacattccaagtaactccagcagaattaattatccaaagaaacagaagaactctacaatgaaaactttaagatgtgacacaggtaatcatagcgacagtgtcagaagatggaaagacaacccaagctcctggactggcagagttaacattgtgactattgcataccccccaaattaatctacagatttaatgtaacactatcaaaattctgatacatttctcttttagaaaaaatacaagaaatcacttggaatcacaaaagaccacacatagccaaacattctgaaggattaagaacactgctgtaggttttacacacctaacctcaaattatactgcagaggtatagtgataagaaagcctgtatgtatctagtgtgcattcactccgccatgaccttgagctatctgtgcatagaggctctgtatctgtggtggtcagagattggatagcgagatacattcatccctggggcagaacagaagactaaggctgcttgctaccttgttgtgtattcgtgagtgtattccaatacatcctaaataaccccttaaaagtgttctcttggattggtctacatttggtgcccacgtggcatcagcctccagcctccacagctgttggcaatcttctcatgccccctgagccccaagagttcccagcttggatccctgggaggcagaatcccctgtctgccctgcgcacaggctccagccctcctgccctgcctcctcatgagcgcccatgggagccagcagttagctgcaccccacagcatgaaccccgccccacagttggcacaactgagcctaacccaactgctggtgctttccctgcccctcctctgttccctgtcaggaaggcctgtgctcacctgcccgctttcctgccctgacccctgctgggcagaggtggcaggctaccacagacttggatttcactgctgctaggaggaaactgcctggcctagggctgaactgcaccacacccagttccacagcctctgagatgcttccccagcgctcattctgctagagcttaagctgtgcctgccagccacacagtccgaggtcagcatgaggccgcaggttgctctttttcttctaactccaggagcccaagtcagagagtatggaataccccctacacctgtaactggcatgaaacaggaaaaaaatcaaaggaatagaacagaggtcccagaaagagagaaacaatgcacacttaattgtagacaaagaatgtaaaacacacattgggaaaatacgatgctgcaacagtgggtttctacctcaggagatgaactttgagtctcacctttctttcttcctttcttttgttttttctttctttccttccttctgttatggtggaggttccatcaagacccctcccccacctccctccaaaccctggtgcttctcagaaagcctgccaaatgatggcccctccccaaagatactcaagagcacccccacaggtatttcatttgcccgccccgccccagggaacagactcttgatttttcaggtctccctttgcagtctcctctctgggcagccagaaggccatccttgagctttgtatccattaaacgtgggctatttggccgagagaattatctgggtgtagaaacttttctccttcctttttttttttttttttttttttttttttttttttaannnnnnnnnnnnnnnnnnnnnnnnnnnnnnnnnnnnnnnntgtcctgccctcaaggtcacagagatccacctgcctctcccttgtgggtgctggccttaaaggtttgtgccatcttttaccttctacaaagatgaactaaaaatggagcaaagaccttatctttttttcaagatatccatgtcattgtgtattgtaaaatgcccatgggctgaacataaattattcatgagtgaacactggaaaagcaaaagcaagattagcaagctgaaggttgaatttacttgatagacaaaaatgctaatcagtgtttaattattaaacatgaacataaatgcaaataacagtttcagaactaagagtagatgttatatgtaagactgatacagctattaaaggtgaattacagtctttttctaattcattcaataattaataaaaaccaacagacaggtaaaaagtcaagatacacaaacaccagtgttccatgtctctaagttcaacgactgttttcgaattctgttgtattggtaatcttgcaaatacaatttcagtattaaaaaattgtcagctcttggaaaatgtctattagtaaaggacctgccacacctgttggtaaaatatctactacaaatgcaagaacaattcaaacacaattattgggaactatttaggatttcaacccaagaaagcacagtgtcaggaacctatgaaaatgtgctctgtggtctcacaaaaatgggagctgtgcttacaggtctaccgtgcacagggcctgcaatcattggtggctgatatcatttgatgctagccaaaactaagttttctagtaagaaaggccatgagtgtcacctccatccctgtgggaaatgagtgtactgaaaaactcttggacctaatcaacatttacggttgccagatactaaatcaatataaaaagaacaggatttggttcagttccaaagttccactgtggccatgtctaagatctgatcctccaaactccattgtatgtgcctcaaatccatggtactgcaaaagcaaagaccatattattttcaaaccttgaaacacccaaacttcaagaagacaaatgagggaaaacccttccagatactggggtagacaagaacttcagaataggacaatagcacagaaactaattaggccatgcatcagcatgaagataaagtctcttcacagcacaggacacaatcatcagagggaacagaagtcacaataggaggaaacttgtaccagctggactgcagacaagggactagagccctcagtttacagagaactgcagaaactaaacaccaaggaactaaactaacattgtcaatcatccaatggttgagagaactgaatagacagttatcttgaaaagggaggaggaggagtagaggaggaggagatgaagaaaaggagaagagaaaagatgaagaagagaaggaggagtagtaggaggaggtggaggaggagcagaaggagccatggtattgggagagggagacatggaaagcaaaggccaaccatcagacattttcaggaaaactacttttctgtctgcctactataagcattgccacaatggtgagtgaccaccaatctaaagtcagaacccctccaagttgccagtgtcaggacccaaattcccatggtgacaagtcccaggttctgcccaagatacagactgacatctggttttctgttcagtttagtggaggtcatgggtggctggggctgtggagccggcctgactgctgggatggggccaggctctcacaccatccaggtgatgtctggctgtgatgtcgattcgaaaggatgccttctccgtgaatatgaacaatttgcctatgacttttatgattacatgtccctgaacaaggacctgagaacgtggactgccatggacatggtggcagcacagatcactagtctggagttggagctggctggtgaggcagagagatacagggcctacctggggggccagtgtgtggaaatgcattgcagatacttggagaaggtgaatgtgactttgagcacaggtgcacaggccaagggcaactcctcactctacacaaaggctatgataaatctgtgttcttcaacacattccaaatataacaggattagagggcgaaggctgacactgtagacctccaaggtgtgatgagccattgggtgagcctgaagtgttgctcgcatagggggtgaaggctgacacaggctcaggacagtgtgaatgtgaggccattgcaggagagcatggctgctactttgacccgacctgcaggacgtcaacctggggcaagagagtcagggatagggaatggggacaagagacacagaaagatcgatcacaagacaggattctgatcaagtggcaaactttacttttctcaggctatcttatatagtcaggatatggagaggggcagaatgggttgtttgcgcaccaggtgttagtataggcatgatattaggaaaccacaaacaggatgtttggcagggtaaagagttcatgagtaagaggtccaggaagggtttgcctaggtgactgagcctgtgaatggaggactgggtttctaaggagcttctatgtaaaggttaactatgtgccctgccaagcatgggctaggatctcattccaagccccgagatttggctcccaacactgcttctcctttgcagccctggatatggccccttccctgagtcctgctgcagtggtccaggtttcacaggctgtgcagagtcctctgtggagtctgattctctacttggtccactgggaacctcagtcctcagattcccaacactgatgtatttggattttgaagactgtcctctgttaattgtgacaaattctttccttgaatgcagtttttgcttttttcctcatgatacaagatcctgaccaagtgtccagccctggagcccccctgtgcctgaatggagacgtagtgaccgttgttctggttgttatctccaccctgttgcttcacagttacaggcttcctacttcccaaggactatcccttaccctttggcttcccagtacccagtccagtgtatcccggtgctgtgtaccattttggataaaagaaccctagattaagagacatgcagaagaaatgtgtactttaaatacaaatatgagcctttcatattgggggttctaagacaccagaggcacttctgcaagctgtggagggctcactaccaacagggctgttaattttatgggtcttttcattcttttccctgcatccacttaggatgagaggatgtagtggctctcctctcttgatgcctggcgtccctgcacaggctggcaacccccatgtgtggattcagactgccactgagaccctgagacccaggggcagacacttgtattttaggtgtccttacggtggggcaagtgtgctattcaaacatccaagattccaatgactccccattgagaaatgttttctctgtatagtaagatctgtccagagtgaaatcttgtttgtttgtttgttttgttgtttgagacagggtctctccacatagccaggctgttctggaaatcacagaaatttccctgtctctggctcccaagtgctggcattaatggagtgtgtcaccacgaagttacaaccatgaaatgttggtacagtgaagggctctggactcaatcaccatcaaatgctatcagaaagacttttatttaaaaaaagacttttattcctgttgtgactaaaatggtagaagtcgaccatgcattctgttcacgagtatacaggcctattgaaaattaaacatataaagaaaaagggaaatacataatcaggcacatgaatgcattgtgtgaatcattccccagaaatctgatttgaccacagagcttttggctctggaaccatggtcttctcctttacccatgctcacaacatcaacataagacatttgggtcaaaggagtgtgatataatacgtagggaagtaatctgtaaccagggctttcatgaatcctagaaagtgagcaatggcagagagatggtgttggctaaatggaatgcagaggacttaagagaacttggccatggccccatcccattgtaaagcatcaccttgctcaggtgagcagtgacaggacactgggtgtttcttagatacaaagactccagggaagcagatgagcagtgtgggagacaatgctggaaaactgtgaatgttcacagatgtgaaaagaacacagatatgatggtgactacagtctgaagctggaatagcagcaacacagcagttatagcatttctttttcaggcaacacacacataaagaccaatttccatatcattaaaaaaagtttaaaatggccagttgttgacagagctcttctttaatcccaggactcaggaggcagagacatgtgtatctgtttgagttcggggccagcctggtgtacagagtgagttccagtacagccaagggtacacagggaaaccctctcttgaaaaaagaaagtttaaaatggacaccatgaacaggccatttactgctgattttgtctcatttgtttggaattaactgatactcctgtgaggaagcattcaacatttcttcatttttttttagattttatttatttattatgtatacaacattctgcttccatgtatatctgcaccagattcataacggatggttgtgagccaccatgtggttgctgggaattgaactcaggacctctggaagagcagtcagtgctcttaacctctgagccatctctccagcccttcattgttttttttttattttgctatttcagacagggtttctctgtgtagtagccctgactgtcctggaccagggtggccaggatctcagtgattttccttcatctatctctggagcgctgggattaaagatgttgattacttcacagaatattcttcactgtttaagacagcttattaatatactgagatgtgctacatagaaagattcacacacacacacacacacacacacacacacacacacacacacacacacacacaatgcttcacctgctgatccaaatgttaccaaagttccttggtcttgatcaatttcttaattacccacactagtagactctgccttaggagttctagggttagcatcagaggctgcaccaggattcccagagccagggaggtagaggcagagcagaacacagtcccttcaggacccgatccaaggtgagtcccctctgatgatcctatacacaagggttagattctgagagattgggggagggggagaacttccaggcaacagctctgaaaggaggcaggagctcaggggctgagggtcacctcctgaggacaggggccttgttggcacagggacaggaaaaacacctcccactgtggccccactccccaggaatgacaacagtgctgctcctccatacaaaccaagaagacaggaaataaacagggagcttggttaaagagccacagctaggactgagtccaggcagtccttactctgcagtcctggctgctcacaatcctgaacacaggacagggctggggacacccttgtattcctgtgatcagtctaccatcatgtggttatactaagtgacaaggacaaaagagctaaggaggacatagcttaggggtgaccacaccaaacccacatggactgagctccaccaggcccagccccatcctcactcagctcccacagactcctcctgtccccatgacagtcagcacagcagacacagattctggaaggttctccatgctggcatttattttctccatcacactttgagaattcttgcctttaatttgaaatgataatctctcaggtcaagcacatgaatcatcaaattcatattcagatttttattttctgtggggaagccaaggcctgtggttcatggcagcagggaggtgacaggatggagttgttttctcctgtctgtgtggatcaggaaggttggctgtggaagggagcagggtcaggatcctggtgtgccagggtgggttgggttccccatatttctcattgtatgaacagaagaaactcagacattgacatctaaagagaattcactggttcttaaggcagaattggtcactcagtctcacttgtgtcacgaaagtcaatataaaggtctctcaaaggctcaccagtcactgaaaggtctaagtgccagaggccttgggactccgtcctttactccttgcctcagctccaatcccaggcctccagggtgtcaccttttcaagcctccagacacaagtcagacctctgggcactggtcctgtctgcagaagaaataaccagacacagtcaggagactgacagctgtggctggaggagaaaccatcagctcagcctccaccccaagtgccttggggacaattcttccctcacatactgacatgcagcaggggcaaagactccttctccacctgtgagaagaaaagctgtgagagatcagggaagtcctggtcaccagaaagtattcacagctgtgactgcagaccagggaagggtcaggggcatgaggagggaagaaggtatgcaggaaagaaccaatggcagtctgcaggtctgtcctcagcaaggacatctctgtcccctgaaatcaggtccccatcacctccccccatcatcaggatatgaacatttctttcctttaccaagtactttagagtaggtgattgtcaacatacagacccagagatgggcatgggtgtgctagtgtgtgtgtgtgtgtgtgtgtgtgtgtgtgtgtgtgtgtggtgtgtgtgtgtgtgtgcgtgtgtatgtgcatgtgtgtgcgtgtgtgtatgtgtgtgtgtgtgcgtgtatatgtgcgtatgtgtgtgtgtatgtgtgtgtatgtgcatgtgtgtgcgtgtgtgtatgtgtgcatttgtgtgtgtgtatgtgcgcgcgtgtttgtgtgtgtgtatgtgcgcgcgtgtttgtgtgtgtgtatgtgtgtgtgtatgtgcgtgtgtgtatgtgtgtgtgtgtgtatgtgcatatgtgcatatgtgtgtgtgtatgtgtgtgtgtgtgtatgtgcatatgtgcatatgtgtgtgtgtatgtgtgtgtgtgtggtgtgtgtgcgtgcgtgtgtatgtgcatgtgtgtgcatgtgtgtatgtgtgcatttgcgtgtgtgtatgtgtgtgtgtgtgcatgtatatgtgcgtatgtgtgtgtgtatgtgtgtgtatgtgcatgtgtgtgcgtgcgtgtgtgtgtgtgtgtgtgtgtgtgtgtgtgtgtgtgtgtgtgtatgtgtgtgtgtatgtgtgtgtgttgcatcccattcactatgcatcattaacggtgctaaattaaaatagaaacaataaacaaaaaacccaaaacaaacaaaatagaccccgcccttcaatacctgagttctttttcatccacatcataacacctccaatgatacaaactaagatcacagctccgaggacagcaccagcaatggtcatgatggtgatggttgactgaggaggctctgggagtcaagagaaaggaagggaaggtgacagtcagggctcagctatcaagcctcaccctgcctaggctctgcagaaggcttcaactttcctgacctcagttctgcaccgcctccctcttaccccatctcagggtgaggggctcaggcagcccctcatgctccacatggcatgtgtatttctgctcctctccaacaggcacctccacagctgcccacttctggaaggttccatccccagaaggtctggtctccaccagctccatgtactgtgtcagttcctcctcatccttcatccaggtcagggtgatgtcagcagggtagaatcccagggcccagcacttcagggtgactttaccttcaggtctggggtgatgggtcacatgtgtctttggagggtctaaggagaagagttggagagttcaggtgttttgtcggggactccagcagggcccctgtgaccatcctttgctgggtcagaagtggggtgatggaggggtgaaatagaacaatagcacaggagctatttgggccatgcatcagcccaagtctcttcacagcacaggacacaatcagcagagggaacagaagtcacaataggaggaaacctgtgccagctggactgcagacaagggactagagccctcagtttacagagaactgcacaaactaaacaccaaggaactaacattgtccatcaacaaatgggtgagaaaagtgaatagacagttatcttaataaaagaaaaagcacaaacggccactaataattttagtgtgttcattatctccagccttcatgaaaatgcagactaaactacttagaagggctggagagttggctcagaggtgaggagcacttgatgttcttgcagaggacctgggttagatgctgtctgagactccagtcccagggaatctgactccatcctctgaccccagacaccaggtacacacgtgtgcacaatcacagtgcaggctaaacacacatccccattaacgaatgaaataaaaatgaaagttaaaactgctttgtgatagcacctcacccagtcagaatggctgtcaccaagaaatctgacagcaaatgctggagaggacatgtgaaagaggagctatactcactcctctctctctctctctctctctctctctctctctctctctgtgtgtgtgtgtgtgtgtgtgtgtgaatatgtgtgcacgtgagcacatgtgctagtgtgcttgcacaaaaattaatacagtcgttgtggaatctttttctatatttccaaaaaaattgatcatagaactaccatatgaaacacatattttattcctggccagatgtactcaccctaatggtaagatatttataccccatggtaattgttgatttattcactaaaaattggatttaatctatgaacagatttgtagataatggaaatttggtacatataaaatggaatactattcggctctaaacaatgtaatcacaaaatacacaggaaaatagatgaatttagcattacaatattaagcgagctcacacaatctgagaaagtacattgtctttcctcatatgtaacatgtagccaataatacatgtacatatgtgcataagtgtacacatgtgtccagtatagcatgaccaaaagacaacgagaaaggctaaatattggggacgagaaaagactgaatacagctactgagttttgaaacaggctataaaactaattgttttctagttatatatttgtcatggattttatttctatctttcttcagttttttgcgagttggtgttggataagtggatgaattgtatttgatgaggaatgtgtaaaattcctgtgacatacggctaacataacagcattcactgagatgtatagcctttgtttctagttaattttagagtgcgactttttctgtaataaatttaaaaaattaaaaataagtagagacaggggcgtgaccccagctgaagggggtctcttcttcctcaggactgagcccattcgagggcagagggaggagttgcctgtggcccctgcacctgtgcgcagcagctggtccttcccgtgctccaggtgtctgctgagccactccaggcactcgccctccaggtaggccctttgatgcagtgcaacaccagcctgctcccacttgcgcagggtgatctgtgctgccatgtctgctgcagtccacgtcctcaggtcgtcgttcatggcgatgtaatcatcgccatcgtaggcgaactgatcatacccacggaggaggcgcccgtccgaccccatgtgacagccagacagccnnnnnnnnnnncctccccccgccacaacatcatctgggcctctcggctccacccaccgcgaccagctcccgcacctgtcctgcccattgtccccgcccacccttggactcctctaaactgaaagagaaagatggttcccctccctatctctctgaaccagactctctgcatatcccacatttccagaagaacctccacttcttgggacccggggcgactctggaccgtttgtagggacgtaaaggtcgggacctccgacccggggtcactcaccgcccttgctctggttgtagtagccgatcgcggtcctcaggttcactcggaaaatctgctgcctgtccttggctctccgtgtgctcctctcccaatactctggcccctccctctccatccaaggcgcccgcggctcgtatctcggattctcggcgtcgctgtcgaagcgcaccccggtgtctctgaaccgcccaaggccaactgcatgacgatgccaggtaaaatacacagaacacttaaaataaatgttcacggaaacaggtgctgtcgcagtcccggtgagtgcgtggggccgccgtggacactgcatggaggtgactggagtttttacagctctggtcaagtccttctgacacactgtgtcatatgtgactctccgtgcaggaaggagtccctactctcctctgctttcactttcttcttaagttatgtgctgctggggtttggagacatcaagtcaaatctacagaaacaaaaaactataaaattaatttttctcctctggcctgaggaaccagaagacaacacgattatgaaatccgatgtcccacaggcctgggacatttgtctccctcatgtcatcagctcataaagtgtgagtgaaggtcagagagagagagagagagagagagagagagagagagagagagagtgatagagttacaggttatgtaacttctaccacggtagtttatagttagttacagttcctctcttactgtggtttattcactaaagcaatcgttccatgaaagtgtgtgaacacatggaaatgtggagtgtagacaggatcaatgacctggtgtatttggtctccatgggtttctcttcccagtggagaaggggtccactgtgctgagacaatgacccaggtccacacagacaatctcaggactatggaatgatgatccatgtaaaacacaaccaactggagtcacagatgattatctgggatgaaacactaggagtctgagtgtaagcacaaggctgtatagacagatcctgagtgaagagcagagtctctatttacaggggagattcctgagcatcaggcttggcagtgtgagcgccccctgcaggtggacacaggagcctggtgtatgtgggagtctgtgtggtgcttgcaggccagagcctctactttaaagagaagcatctctctccttcatcccacttttgccattgtatttccggaagtgacttttctactgggaggtccagggtctgacttctgaagagaagaaggaagaggaagggtgaggagaggaggaattgttttgggctttgggtctctgctagtgttttgggttttttttttttttgtttgtttgttttgttttgtttttgagacaaggtttgtctcctcaggtctggctattctgaacttactgtgtagacctggttggccttgaactcacagagttccacttacctttgtatcccatgtcctgcgtttaaaggtttgtgtcaccacacctggccttagttacttttctatggctgggataagacactgtgaccctagcaacttataaaaggaagcatttaatttagtcttaacttttcagagggtttgagtccatgatggcagaggaaaggagtggtgacaggaacagctgaggctcacatctctatccacgaacaagtgtctgagacactggggattttttttttttgaggtaataatggaaatgtaatgttatatgttcatacagaataatctaaaagcatgataattgattacacagcagatgatatgccaaaaatatagtaagttttagaaaagggaactacttgtttttttttttcatttttaaaaatttgaattagaaacaagattgttttacatgtcagtcccagttcccactccctcccctcctcccctacccccccaactagcaccctacctattacatatcctttctgctccctagggagggtaaggccttccatagggggtcataagagtctatcatatactttgagatagggcctagacccacccccatgtgtcttggctcagagagtatccttctatgtggattgggctcccaaggtccacatctatgctagggataagtactgaactactacaagaggtcctgtagatttctgaggtttcctcactgaaacccatgctctggggtctggattagtcccatgtaggtaactcagctatcagtctggggaccaagagctccccgttgttcaggtcagctgtttctgtgggtttcacaagcttggtctggacccctttgcccatcactcattcttctctgcaactggattccagttcagttcagtgattagttgtgggtgtctgcttatacttccaccagctgctggatgagggatatggggtggcatataagtcagtcatcaatctcattatcaggagaggacatttaaggtagcctctcctctgttgctttgattgttagctggtgtcatctgtgtagatctctagacatttccctagtgcctgatttctctgtaaccctaaaatgtctccctctattatggtatctccaatcttgttatcttctattcttcccctgactcaacctttctgctccctcatgtcctctgcatccctcctcttcttcccttctcgttctcctagctccctcccccagtgggaatcttttaatacctcaatgcccagcccagtgaaacacctcctccaacaaggccacacctctgatccttcccaaacagagctggggtatctggagctgaagtatctgaacctctgagcctgtgtggccattctcattcaaccatcacagtattcagtgtggaatgtggatgccctgcagggctctgcagatgtgtccctgagatctgtagacagcaccctcaaacaggagttctccactgcattaggatctctgctttcttctgtcacctcctgcccagcccttctgtgtctcctcaggcatcaacccttcagtgcccagaacccctcattcaagctctgcactaacctttgcatccagtttctatggctagccatcttgtcagctatcttgctatgaaccaggttgtgtggtttccttctgtaaaattccaataggggctggagatacggttcacaggttatgagcacctgttctgttgaagagaattcatgtttagttcccgtcaaccgcatggtgcttcacaaccatctgggaatccagtttcaggtgatcctggcactggatcactgcatgcatacatgcatacacacatgcatacatacataaaatatacatgcatctaataaaaatacacatatgcagacatctaataaaaataaaagtaaaactacattttaaaagtgctccaaggctccctctcctacacatgtagagtgtgacacccagcatgagggtacagggctgtttagttaccattgaaccaccaattagtgaagtcagagctggaatgagacaggcactgatgactgaaatagactgtgctgaaatgagcattagcaaaacagtataaagttaaatatacaggaagatttcattttatggacatactgtgcacggtggatcacaacctcattccaggaagaagacactgaatgtgctcatctttgcacttgagccctgtgttggtttttaatcgctgctgaacaagatacactccagtcaacacttgaatgataattgtaagagatcacaacatccccaacatccagaaggttcctgtagctagtgacgtccccgtcctcatcctccctcccacttcagcccttctatgatctgtcttttcaagatcaaagagaattattagcgtctagggcaagagccccacctggggaagaagaaacaggactgctctaagcccacataggataaagctaaagggggatcatgtctgtctgagaggtcacaggcccctatctatacaactccaagggtcttgggtctgaggctgtgctgcccttgtcaaaccttcagcccgatagaactttctgtccttttccacctgtgagaagaaaacctgttgtaagagggtagggaggaggcagagccatgaggaccaaaaggacctgaaaagcttgggaccagggaagtttccagaactctgaaacagaataggacatctattcttggttgtcaacctgagcatatctgaaattaactaacactgaaaaatggaggacacccctgtgagggacgtttgcttaatttgaaggcagaaggtcagtttctgatctggatctttgtggtaggaagacacatcattaattcagatcttttgagctggaaaaacccatctctaatctgggccacacctgctggaagtccatacaaggacgtgaaagaaggaaggttttctcttgacttgcttgatcacacttcactagcaagtctattccttccctggcattagagccgacttcctcaggattctagtgcatactaaaggccagctgagacaaccagcctggtggactgactgagcaactacttgatttttggactttttatttatagtcagacattgttggattagctggaccacagactgtaaattattctaattaatcccctttctatagatagatacatagatgcacagacagatacatagatgcacagagggatacatagatgcacagatggatacatatctagatagattcagtctttaagttctgttacactagagaattgtgactgtgatggtgacccaggaaaggctgaggaaacactgggatgagatatggaggaagaaaaccaaatgccctcctggagaactgtcctcagtgaacacctatccctccattctctgactgctgtgacccaagtcccatctccaccactggggtgtcataagtctgtcctgtgtcctctcatgtgctttaccataaagtgtctgcaagctgagccccaggctgggtgagcaccttgtgggatgctacactcataatcccaagtcccattcctgaatactagagactcgaatattggaatctctcaagaccaacctctccaaatcataaaattccaaagtcacagcctaaaataaaataccaaatgtttaagtctgctaaatcaaattccccatgagtacagtccccatggtgtggagggtgttactgtaagaacacagaaagccaagttctagaaaagccttgggcacacagcacagctcctttgaaaaccttataaacactcatcattctctacacgtttgtttcttccatctgatgaaagcccagagcctttgatgaaccaaaacttccctagtctgaagatgccggtgaagttagtgttggcatctgagtctatagcaggacctgtgtgtaccctttctggccatgtgaccactagtatcaaatctgcccagcgtgtggtctggatgtgagcacatgcagagtagattccctcagggaagcctggcccagcagatgggaaaggtgggcagggagctcatttctgggtgtatcacattacaggagaacttgataaaacctggcgataaagaaaattatcctgaacccgtggtctggggaaagccaggtgctgagagaaaaacaaccctgctactcatgacaaccaaaacctgagagtgcagttaatgatcctgaaggtctgcagactcagcacatttgctctctttagcatagtgtgcaaagtagatgttggtgctggcttaaatcccagcactcaggaggcagaggcaggtggatctctgtaggttcatggtgatcttggtctacagagagattcaggacagatatggctacatagagagactctgtcatagtaaagcaatcaatcagtcaatagatcgattgatcgattgatcaatcaatcaatcgatgtatgcaccaatttacttaaatctgggaattttacaagtcttaattccctgagacaggaaatcactatcccctccagcactgtgcccagcctgtccccagttctaggagtgaagaacccataacacaatccccaaggccaacctaggagaaatgcagatctgcacactgacagggggaacctggaccctggctctgggaccaagccacctcctcctgctccccatgcctcctgtgcctggctcacctcactgaaaccaagattgccacctgcagtgacgatggcacagatgataggatgtgatcttctctgacagctccctattgtagcacatgatctaataggtcttaataataaatacacagtggcagatattaggggattaaaactgaaagattagagaagcaaaaacagccagtcactacctcttacctctacctcagaccaaatgggccatcctgtctccatgagtcctcagaatgaatgctctatctacaaaacctcacactgcaccttcacactgcaccttcacactgcactctcacactgcatcctcacactgcatcctcagactgcaccctcagactgcatcctcacactgcaccctcacactgcatcctcacactgcaccctcacactgcatcctcacactgcaccctcacactgcatcctcacactgcaccctcacactgcatcctcacactgcaccctcacactgcatcctcacactgcaccctcacactgcatcctcacactgcaccctcacactgcatcctcacactgcaccctcacactgcatcctcacactgcaccctcacactgcatcctcacactgcaccctcacactgcatcctcacactgcaccctcacactgcatcctcacactgcaccctcacactgcatcctcacactgcaccctcacactgcatcctcacactgcaccctcacactgcatcctcacactgcaccctcacactgcatcctcacactgcaccctcacactgcatcctcacactgcaccctcacactgcatcctcacactgcaccctcacactgcatcctcacactgcaccctcacactgcatcctcacactgcaccctcacactgcatcctcacactgcaccctcacactgcatcctcacactgcaccctcacactgcatcctcacactgcaccctcacactgcatcctcacactgcaccctcacactgcatcctcacactgcaccctcacactgcatcctcacactgcacccacacagtgcatccttacactgcatcctcacactgcatcctcacactgcaccctcacactgcattctcacactgcgccctcacactgcaccctcatactccatcctcacactgcatcctcacactgcaccctcacactgcaccctcacactgcatcctcacactgcatcctcagacttcctgtctccttccaccttatattcctttttctgcccagcaatatcctcctgtctccatctctctagagctgggattaaaggcatgtcatcccaagtgctgggatcacctttgtgtgagctctgtttctctatagacagattcaatttcatgtagcccagggtgtccttgaactcacagagatctgtctgcctttgtttcccgagtgttgtgattaaaggtgtgtgtccccactgcctgggctctgtggctaactagtggcttagttctgcactctgattttcagacaagctttatttgttaggtcattaacaaagtatcaccacaccctatggtgtaaggttctactctctctgtcaatccataaacaggctgaggactttactcagtattttctgaatcacagaatggatctgtggttggttccctggatctgtcacacttgggccaacatcagcctcctccttcaatgcctgcagttgagtctctttcctccattggttcctgtcagctgcagctgctccctctaccactaaccctgagccctgcatggatttttcagaacctgagccctgggtggcatttgacagggtcagggtttccctgggttacagggttatcgatgaagcagggatggtgcagggaccatctcagactttggaacctgctgacccactgtgtgcaaagctcacagctgctgcctaagcggtgagaaccgcttgaaggtgctcgatgaccatgcccacagcctgcaaccctagctgacccacccaggactttcactttgatctttcacagagtcatggagtctgtgatcctcaccctggcagtcacttcaggatctacagactctgagaagctccggtatttttggcccctccatggacgtctgcaggggctcagagtttctgtgtctttactgcatccacaatggcaccagtcatccagaaaggacagtggagggaagaaaaggaatttaaggtcaagcaggagggaagctaagggtgccttgaatgcttagtgaatgagtgatgtcaccagcagattatggggagccccatgtgcaccccaaaacctgtgtgtacccactgaagctcttctcttttgggtactctctgtgccaaagaagaaatcttgtgtgcaacactccagtgggacaagtcttctttgatgtgacaggagcagggtctctggagctggccaacctggggagtcccccaatgaggggggacaccaggagggcagagcctggcttaggctgtccgaagtgggaggatctttcttctcttacctcaatgccatgctgtaacctgacctaatgaaagcagtccctttgaggttgggagtgggccaggttactctgagtttgtactaaagtgctgtgggtgagctctggcaggggttggaggtgttgaccatgctgagaccctcaagttgtcagttgtttgggatcctgcccttccttccaggttttatttcaagtatcccattccctaagatcaggactattattttcttttgattgagacagggtctcactttgtatttttggctgtcctagaattcactttgtagaccaagttggactagaactcacagagatccacttgcctcttcctcctgagtgctggtattgaaggtgtgcgttacccatggccagccatgactgtttgttgttcatctgtttgtgctgtaactaaaaagcctttccaagggcaagaggagccaactatgtacaagtcagaagctcatctggctctccatagctgttacgataaatctttccaccaaaagccgctgagccccaccgccagagttaggcccaaatgaatacacagaaacttgtattaggttcaaaactgcttggccaatgactacgacttctcatctgctaactcagtcttaactatcataaacctatatattttataagacttatcttatcagacaccttattggtgtccctccttgctgggatcataccttgccactggagcaggagcggaggggaaaaagagacgcttcctgtttctccttcgcttaaatatgagtctccttgctatgtcacctcctgcctggatcacacttctctactacatttcccagaatcctatttgactcctagccccttctaacttgctctctcattggccaaacagtattttatttaacaatcaataagataaagatacaaagtacattccccatcacatagcttccctttctctgtgtcacgtggacttggatggaccttggatattctaagggccttgttctgaggtgacatctctatcctagggaagctgtgggaggattccttcagggagtccctgggagagagaactctgatgagggccagagccattgctgtcctctttccactttttcagctaacacacttgctgcacaggcctgaccccttgagagtcatccatggaacccacctgtgggaaggagagagccaactaccacacgttgttctctgacctccacacacatgccatagaatgtgtgtacccctacatcatacacaacaaaataaaatcctggtggccagagagtccactctgcttaagagcaagaattcagtgtctgcagtcaggtgactcacaatggtctgtgatgctagttctgtcctccatgtccatgcattctcagggacacaaccacacaggtccatatatgcatataattaaacaatatcaaccaggcatggtggcatacttcctccaggacagtctgcagtactgcctgctgctccagcctctccctgtcacacccacagttagtccaggaggaagaactgtgatgtcatctgcagagaggacccagaatgcctcacttcccatcctggtgacctcacaggggacactggagtgtgcatcaggagcaggacactgctttccccaggtccccactgtctgcctggctcctcccctgctacagttccctccagcagatcctgttagaagaggaattgtgcctctgttccctctgctcaactgttctaactcctgtcacactgtgaggacaagtctgtgttgtgtgacagagtgtccctggaaagacacacacacacacacacacacacacacacacacacacacacacacccattcatctcagttagggaactcatagctgacaaagtaaccattgcatcaatgcccatattggtgagccagtgggttttattggggtcaccaacatgtgtgtgggagaggggttactcacagggacaggaataactgactgcccacagggcatcactgaaaagcccaccccaacacaggtaacaactcatggaacttcctccctggagctctctgcacagcttccaggcagctagaaagtcaaagaattctctccacagctggatggtcagtgtgctcccccaggacatgttactccttgtcatacatctgcagagaaatcctagagagttgtcagagtttctttatataaaattattttattttacatacatgggtgttcatgtatgtatctgcaccatgtgtgtgcagtgcccgctgaggggagggaagggcttgaatcctctggaactggcgttacagacacctggaagctgggaatcaaacccctgtgctctggaagagcagccagtgctcttccctgctgagccatctcgccagcccctcttccaacttctgttctcccagacacatgaccttgtgttactcctgagtgtcagtggtgtccctgtccctctaggagagaatgtttcaactcagaaggaactgcaatagaacagttggacacttccagcattctcctggcctcattgtgtagatagccagtgactctgctccaggcatctgcttccttagtcttctcagaacacacagccatgctcctgcctcagcacatctgattgcatcacccacagcttggaaggaatttgcttcaacagtctttagaatgatttcttcttcttttaaatacatttttatttattcttctctcatacaatacactctaactgcagcctctctccctcccagtcctcttttctctcccagattcactggccctttgtttctcttagaaaagagcagcctcccagggatatcaaccaaacagggcataacaagatgcaataagaccaggcacaaacactcctctcaaggctggaggttgaggcaacccagtaggaggaaaagggtcctaagatcaggcaatagtcagagacaacctcactcccactgttaggatgttacaaaaccccaagccaaacaaccacagcctatatgcagaggtccaagttagtgcagacccaagcaggcctcattgtagctacttcagtctctgggagccctgagagccctgcttagttgattctgtgggctgtgttctcttgtcctcacccctctgtctcctgcaatctcttctggccctcacccataggagtccccaaactcggcacagtgtttgggtgtgggtctctgcatctgctcccatcagctactggatgaagcctctctgatgatgattagactgggcacagagatgtgagtatagccgaatttcattaggaatctttccatcgactttttttttatcttgtttggtctctgagcctttcagcttctggtgctcagccatccaggcagtgttaggcatgggttccctcttgtgaccagggcctcaagttaggccactcccattagctctgagccaccattaccccagcataccttgcaggcaggataggtgtggccaaagattttgtggctgagttggtttactggtcccacttctgggagccttgtcaggtaactggagatggctggttcaggttccgtatcctccgttacttggagtccttgctagggtcaccctcagaggttccaggaagtttccactgcactatgtttccacattgccctccaaatgccctccttccagttgtctcttcctgttctctctccctccatccctccgtttaccgggctttttcttttgggccaccaaccagctcccaaatcataatacagacacttcttattagttatgaatgctcagcccatcttaggattgtctggctagctcttttaacttaaattaacctgtttctctttatctacattttacctcagggctttttatctttctgtatatcttagtttcattgcttctcatgtctggctggcagctgcctggcttctggccccaggcatgtccctccatttctccctcattctcccctcttctcctttctatttattttctctgcctgccagcctcatctatccctcccctgcctggctattggctgttcagatctttattagaccaatcaggtgccttacttaggtgaggtgaaggaaatgcaacatttctttacataattttttaaaaaagatttttatttatctattaggtacacagttttctgcctgcactccaccagagggcaccagacctcattcaaggtggttgtgagccatcatgtggttgctgggaattgaactcaggacctctggtagaacagtcagtgctcttaaccgctgagccatctctccggcctttctttacataattaagcacacatccttacattgttaaacaaatgcagcataaagaaatgtaacacgcctttatgcagttaaagtgatataccccagcataaacaaatgtaaaacaacttggcacagtaaaaataatattccacaagactttcctgccccacgtgatccatcatcttcccattgccaccatacccagtccacccacaagatctgttctatttccccttcccaaagagatctatgctgcccccagatccctctttgcactcagcctcacttggactgtgcatgctagcatggctgtcctttactttacagctaatatccacttatgagtgggtacgcgtctgtttttctgggtctggaataccacattcaggatgattttttctggttccatgaatttttctggaaaatttcatgatgtcattttccctaacttctgagtaatactccattgtgcaaatatacctcgttttctttatccattctttgttaggggacaccttggttgtttcacagtttctgactgttatgaataaagccactatgaatacagttgaacaagtgtccttggggtaggatagggcatctcttggatatatgcccagagtggcataactgggtcttgaggtaaatagattcccatttttctggggaacaaccacattgacttccatagtggctgtacaagtttgcatttccatcagcaatggaggagtgttcccctggctccacatcctctccagcaggagctgtcacttgtggtttcgagcttggccattctgacaggtgtaagatggcatctcagagtccttctgatttacatttccctgatggctaaagatgttgaacatttctttaagtgcttcttagccatttgagatccctctggtgagaattctctgtttagatatgtctccaattttttagattggattatttggttttctgatatctagtctcctgagttctttacatattttggataaaagccctttatgggtgttgagttggtaaaaaaaaaaatcttttcccattctgtgggttgctgctttatcctcttgatggtgtgctttgccttacagaagcttttcagtttcataaggtcccatttattaattgttgatctttgtgcctgggctatcaggaagttatctcctgttcaaatgcatacaacactattcactactttctcttctatcacgtttcagtgtgtctggttaatgcggagatctttgttccacttggatttgagttttgtgcagagtgatagatagggatctattggcattcttctataggcagacatccagttagaccagaactatttgttaaagatggttttttctattgtgtattcctggcttctttatcaaaagtcaggtgtccatagatgtgtgggtttatgtctagggctttgattcaactccattgatcaaggtgtctgtttttatgccaatgccatgtggttgttattattacaactctgcagtacagtttgaaatcagagatggtgatacctcagtgagttcttttattgtacagaatagtcttggctatcatgggtttgttgtttttctgtatgatgttgtgtagttttctttcaatatctgtaaaaaattgtgttgaattttgatggggattgcattgaatctgtagattgcttctggtaggatcatcatttttactgttagtcctacatgggagatctttctatcttccaatatattttccaatttctttcctcagagacttgaagttttgtcacacaggtctttcacttgcttagctaaaattaccccaaaacattttatattcgttgtggctattatgaaggatggcattttcctatttttttctcagtgtgtttatcatttatatttaggagggctactgattttttttttttttagtcttgtatccagccaatcactgaaggtgtttatcaggtgtaggcatttcctgataatttttttggggtctcttatgttgaacaaatgaaccttaataactgctgcatcattgggatgtcctgatccaacatcgaggtcgcaaaccctaattgtcaatatggactcttggatagtattgtacccttatccctagggtaacttggtcagttaatcaaaatgttttgagtaaataagattttgatagttggactggagagaagactcagagtttaagagcactggctgctcttacagaggtcctgagttcaattcccagaaaccatatggtgactcacaaccatctatagtgggatctgatgccctcttctggcaagaagtcaatagagcactcatataataacataaataagtaataaaacttttttttaaaaaaaagattatggggctggagagatggctcagaggttaagagcaccatctgctcttccagaggtcctgagttcaattccaagcaaccacatgatggctcacaaccatctacaatgagatctggtgccctcttctggtgtgcagatatacatggaagcagaatgttgtatacataatagataaataaaatctttttaaaaaaagattatgatagttactttgatttgtgactcaacgttaaaatcatttgaagggttttttaataccccaaggacaccctaattaaaatttgtaattttaaatattaatccaatagaaaagttataatcaaaatttaattaattaaagttccacggggttttttcagctcattggtttatttctgcctcttcatgacaaggttaatgacactgattagaaataagagacagttgaacccacatggaagccattcatgctagtccccaattgaggtacaagtgattatgctatgtttgcatggttgggtaccatgactctctaaagtcagtcactgggcaagcaatgcctctgattcttgtgatgctaaagatgatatttttggtaaacaggtaggtttggattttctgatttctttttatttcttttaatcttttttttgaagcactcctgtgttgggtgacatattaccagtaggtaggtttatggggagggaaaataactttaagattgctaacatggttatctaactcgttataagcttgtgcagggagaataaaattcttgtcactcatattaacagtatttcatctctatatagattaacccaattttaactatagcaatcatgttggacattaaaattagagtgcttgaagtatcgagcttgcacactttcttgattggtggctgcttttaggtcaacaatggttttggtattaagctttgttcactattaaagatggtttccattcctaaagagctgtcacttttcaggctatgttttaagttttccttttgattatatgtttgcagtaaacttagatttgaactgaaagtcatgctaacacatcattggcaaataatgatactttgacttcttcccttcttaaagaaagcaaggaaaataacacagcaaaaactgtataaaatgagtaaatcccttaaagaaagtcaagaaagccaagaaaaaacagacagttgacagaaaaaataaaagtgttcaagacctgaatatggaaataaaagcaagaaagaaaatatgaactgaaggaattctggaaatggaaaatctgaactctactggaactacagatgcaagaatcactaatagaatacaagagatggaagagggaatctcgggcattgaagatacaatagaagacatagatacatttgtggcagggtcccatagctgtttagtcccaaataaacacactgaggcttatattaatgataaactgcctggctgatggctcaagcttcttattagctagccctctctcttaattattaacccatttctattaaactatgtattgccatgaggctgtggcttacccctaatgctctggcatgttaccacatggcatctacatggcatctctctctctttgtattcctctttccagcattcctagtctggtagctctgcctatacttcctgcctggtgacattctgcctgcccattggccaaacaggtttattcatcagccaataagaaaaacttatattcgcaacatacaaaagaacatcccctaccatacattggtcaaagaaaatgttaaatctaagccattcctgacccaaaacatcagggaaatctgggacactatgaaaagaacaaacctaagaaaattaggaatagaagaaggagaagaaacccagttcaaaacccagggaatatatttagcagaatcatagaagaaaattttcctaaaccaaaggagatgccgttaaagatacaagaagcatacagaaaaaaaaaaatagccgagcgttagtggtgcacgcctttaatcccagcatttgggacgcagaggcaggcaaatctctgagttcgaggccagcctggtctccacagcgagtgccaggataggccccagagctacacagagaaaccctgtctctaaaaacaaacaaacaaacaaaaaagaagcatacagaacaccaaataaattggaccagaagaaaatcccctctccacatagtaatcaaaacaccaaacatacagaacaaaataggaatattaaaaacttcaaaagaaaaagagcaagtaacctttcagaattatacttgacttttccatggagactgtgaaggccagacaggcctggccagatgtgctgaagactctaagagaatacaaatgccagcccagactactttacccagcaacactttcaatcaccatatatggagatagcaagatatctcatgacaaagtcaaaatttatactaactatctacaaatatggccctagaggaggtgctggaaggaaaacccaaacctaagaggattaattacacacatgaaaacacagcaaataaataatctcacattagcaaaacaaaaagaaggtaaacacacacacacacacacacacacacacacacacacacacacacacacaccaacacagtataacaggaattaatgtcaccctctgaacgaagcttcactgaaatcctatttaaactcttaggggtggggagatggctgagatgccgacaacacctcctgctcctgcccagagccaagttcagttcccacacccacacccaggtgctctgacaccctcttctgacctccaggacctccccactcacctgactactcacatggatgccacacgtcccctggggtggattccctgagaaatggcccccataggcttgggtagttgaaatttgttccctagttggttgcactatttgggaaagttgaaccctaagttgtgtggcttgctggaggaggtatgctcctgaaggagggctgtaaggggaaagctccatctgcctccatttagctctctctgcttcctgtttgcaactgaggatgtgagctctgggcttcctgctccagtccccctgcttggggctcagggcactgctttcctgccatgatggtctcttagccagtagaagtgtagcccaaacaaactcttctaaatgttgccttggccatggtgtttcatcacagcaacagaaaattactcatacgtacacatgatttttaaaaatacttttactttgtagaccatgttgatcctgaactcccagaaattcaccagcctctgatttcaaagacctaggcaaaaaaaacaaataacctaaaaaacaaacaaacaaaattccacaatatatgttttaaaggcaataactctctgtcctgttctatacacttgcactctgggcattttcccttttgccctccaactcctgagacagcctgtccttgtttattcccttacactgtatcataggcatcttcccacaacagtgattgctgcaggagaccagcaacactgtatcacttcctagtgagtctcagaaacagggctttctggaacacactctgtgagctgatcacagtggacacggctgtgccccctgtttgaggagtggatttcctccactccagatggagagagtgacagcagaccaaggaaaacaaccattaccatcagctcagtgagccctgagctcactggtcactcacaggagcctgagtgagtccggggataactactgacatcccacccagtgtgcatgtcactcacacagctgcatcactgcagtccccagcacagctcctcaacagtctcctctccctcagggaccacagctggtttagccctgagagggaagtgctacattgtgtcagctctgtgaacctgtagcttcttgtgtttcttgagcctcatcatccctcacaagacaaagatggctgcatcatgacagagatagtcaccttcttggtcatcagacatctctgctaaggctcctggagatcctgactcaagtcacaaggctagaagagaaaccacaggggccagaacctggagcaggggatgaagtaatttccatctctagcattcccacaatctattttttaaagatgtattaattttacatctacgagtgtattcttgcctgtgtatttgcactatgtgtctatctggtgctacagaggcatttgatgctatggagcaggacttttgagtggttgtgagctactgtgtaggtgcaggtatgtgaacctggttcctctgcaagaacagcaagtgctctgaaaccctgagccatgcttccttcagtccctggatcatgtctttttaaaaattatttatttaatttagaaacaatcttattttacatatcaatcccagttccctctccctcccatccaccagtgccttccaccgatccccccatcccacatcccatcactcctcagggagggtgaggccttcgatgggggattatcaaagtctgtctaatcattttgggagggctgagagaatatcccttcatggggaatgtgctaccaaagtccatttgtgcactaggaataaatactggttctaatgccagaggttccataggctgcccagtcttcctaactgacacccacattcagagggcttggttcggtacaatgctgcttccctagctttatgtctggagtccacatattctcacttggtcaggtcagctgtttctgtgggtttccccagcacagccttgactccttggctcatccctcctccctctctacaactggattccagaagtatggctcagtgcttagctgtgggtgtctgcttctatgtccatcagctacaggatgaaggctctaggatggcatataaggtagtcatcaatttcattataggggaagggtatttaaggcagcctctccactattgcttagattcttagttggggtcatccttgtggatctttgttgatttccctagtgccagatttctctttaaacctataatggctcctatttaaggtatctctcttcttgctctcctctgtacttcccctacacagacttacttctccctcttgttctcctccacccttctcttctccccttctctttctgctaactccctctcccccctgtgcccccaattgtctcaggagatcttgtccttttcccttctctaggggaccctgtatgtctctcttggggtcctccttgtctcctagcttctctggaggtatggattgtaggctgtgtagggactcagtgtgcatgtgcgagcttccccttttaaacccatagcattattctcctctctctctttttctgtcagtcaacctctctctctctctctctctctctctctctctctctctctttctcccctctcttctctcttattctcttccctgctttgttcttccatttctctctcttcccctctccttctcccaccctataataaactggttaatgtgctctctatatttccatgtctatctctcgacttctaatttaagcaaaagaataacactgtccacacaactccaagggtctcaggctgtccttccctcatcaaacttacagccacaactgtagggacccaagtataatatttcagaaagatgctctgcccagccataaattctaggagctaggaagttctattgtctttgtcagttggtttcctactgatggcctggattcagagaggaatttctcctattttgtataacaaaagacctaggcctgggagagtctacccccaccctgaaggctagtgagacttgctggtgtggagtgtctgagggcttgagtacctgctgcttaggagtgtctctagggttagaggaaatatttcctattcaaccctttatacatgataatagatgtcttctgccattgcccccacttttgaatacattaatatgatacttgaataaaccatggtctccagtactgactgagagccctcctgttatgaccacatgtctctgtctcatcctcagcatcattgggtagctaggccttccctcatccacactctcacactcagagtcagacctggagctgtttggctggttctgattgcagccctgaacagatcagtctggaatagatgttccctgcagtgtgggactgatacaggctggatcctggcacacaagggactttccatccttttccagctgtgagaggaaaacaacttgttttctttttttccaggtaggaggcagagccatgaaaaccaaaggaggctgtgaagggaccagccccccattcccgcagccatgacagtaacacgtgctcgctatgaccttagtcactagaggttaggtgcctgcctcgtgacaaggaaccaatcagaagttagctggtggcgctatgctttatgaccctgggtgtactttacgggtaagtacacagcaatgacgcacagagcataacaaccaccctgggagggcctatgggccataacaaccagttggccaatcaacacagggcaagccctccaagcctggaggcacaccaattgtgagcctctgcgtacccccttacgctgccctataagatctctctctctgcagccggttcaagctgtcttttgtagtcaaccgccatggtgggtggacaaaagacccgagctaacatggggttagctcgttaaattacaataaagcctcatgcagtttgcagcaagctctcgaatctgcctagtgattggggtgatgtggtcgtggcctgggacccaggatacctgagttttccgggggtataacagctgcagagcctggacccagggaagtttccagaactctgagacagactgatgtctgttcttggttgtcacctgtactacatgtggaattaatagaaacacaaaaacagggatttctgcatgatttgagatgatttgcctaatttgaagtgggaagttcaacttctgacccggatctttgaggtgggaagataacctttaatccagatcttgagtctggaaaaaccacctctaatctgagccatgccttctgctgagagcctatatgaggacatggaagaaggaagcttgctcttcaagcctgctgctcttgctcttggtcttgctagtgaagggaccattttggcagctgtaacagccgaacacgtgcttgtctgaccttgtcttagtcactaagaggtcatacacctgcctcgtggcaatgaaccaatcagaagttagctggtggtgctatgctttatggctctgggtgtgctttacagacaatgatgcgcagagcatagcaaccaccctgggaggtcctatgggccataataaccagttgaccaatcaacacaaggcaagccctccaagcctggaggcacaccaatcctgagcctgtgtgtacccctagacactccccttacgctgccctataagatctctatgcagacgctttgcagcgtctttcctagccatccgccatggtgggtggatgaaagacccaagctaacatggggttagctcgttaagcaacaataaagcctcgtgaagtttgcatcaagctttcgaatctgcctggtgattggggtgaccgcagtcctgggctgagatcctggaggactgagcttccgggggtcttacactagcaggtcctttccttcactggaattagagccagcttcttcagggtttagcatttactggagaacagctgagacatccagcctcatggactgaacaactattggattcttggaatttctgttcatggctagccattgttgcattaccttgaccacagcatataagtcatcctgatatatcctagataaatagatagacagatagatagatattcattaaatcagttcttttactctagagaaccatggctaacacagatttttataacagaagtggttctggagcaacagaaatataatgatgactcttttaaatatctggaagagcctttccaattttccaacacctacagctacaaagccttttcagttactgacacctgtcttgggagctcagagagcactgaaggctcatggtgtgtattttattgattccagccctgagtttcattatttcctgctgtctaccccccccaccccgagtttgtttcctattgttctagagctttcaggtatgctattaagtcatttgtgtgagatataggcacttaatgctatgaactttcctcttagcactgctttcatagtgtcccataagtttggatatgttgtgcagtgattttcattgaattttaggaagtctttaatttttttctttatttcttccttaacccagtggtggttcagttgagaattgttcagtttccatgagtttgtaggctttctctagtttatgttgttgttgaactctaattaaagagtccaataagatataggggttattccaatttttctgtacctgttgagatttgctttatgactgagtatgtggtcaattttagagaaggttccaagaggtgctgagaagaaggtgtattcttttgtgtttgggtgaagtattctgtagatgtctattaagtccatttgtttctttgctaagtttctgtctggcagacctgtccttgggtgagagtggggtgctgaagtctcacactattagtgtgtggggtttgatatatgatatatgatttaagctttagaaatgtttcttttacaaatgtgggtgcccttacttttggggcatagatgttcagaattgagacttcatcttgatggatttttcctttaatgaatataagatgtcctctatctcttttgattaactttagtttgaagtatattttgttagatattaggctagccatgctgccttgcttcttaggaccttttggaaactcttcccaacctttacctttactctgaggtaatgtctgtttttgaagttaaggtgcgtttcttgtatgcagcagaaggatggatcctgttttcatgtccattctgttagcctttttattgatgaattgagtccactgatattaagagatgctgatggtgattgctaattcctgttgttttttggttttggtggtggtgatggcagtgtgtatatttcctttctttgggttttactgttttgagattatctattgtctgtgttttcatggatggaactgggttccttgggttagagtttaacttctagtactttctgtagtgttggatttgtggataggtattatttaaatctggttttgtcatgaaataccttgttctctccatctatgttgattgaaaattttgctgggtatagtagtctgggctggcatccttagtcccatagtgtatgtgaaacacctgtccatgaccttctggagaagtcgggtataattctgataggtctgccttatatgttacttggcctttttcctttgcagctcttaaaaattctttattctgtatgttcaggttttggttattatgaggtaagggttatttgttattttccttttttgttttagtctgtttggtgttctgtaagtggcttgtactttcataggcatgtccttctttaggttaggaaagttttctcctaggattttgttgaatgtgttttccatgcctttgatctgggattcttctccttctcctatccccactattcttgggtttggtcttttcatagtgtcccagatttcctggatgttttgtattaggaatttattggatttatcactttctttgaccgatgtatctatttgctcttcaactccagagattctctctttcatttcttgtattttgttggtgatgcttgatctgtaatttctgtttgcttccccagattttccatttctagaattcactcctttgtgttttctttattgtttctatttcaggtcttgaactgtttccttcacctgtttgttttaccttggctttctttaaggcatttattgatttcttctaattttttgtttgtctttccctcaacttcttaaagggaatttttcatttcctctttaggagcctctgtcatctccatgaggtaatttttaagtcattttcttgtgtttcagttgcactggaatattcagggtttgctgttgtaggatcaccggattctggtgctgccccattgctctttaggttgttgaatgtattctgacatgggcatttactcatcctttcttctaaccattatggcttttgcctgtgtctcttcttccaactgttgtggtttgtacctgtgcctatgtagtctgctgtttttccatttggtgtggtttgtgtctgtgtagtctgctggggttgtggggggagggctgagcatggggagggtgttcaggtatgtggggttgggtaccagagtgggtcttggtgggccagcatccagtgggtggtgggagttggggtgcagcctcaaggccggtttctcacctgcctacagacaggctggtggagaatgcaccagagcagtggagttcgtccagaagtgggggcagcatccagctgccttgctggtactgcggtgccctagggttcagttaggatctggactttggggcaacccagttgagagctggtaggaacttttaagggggtgcacatgtcacacagctgatggtgaaaaggcacctggcaacagatcatgatgtaactgctttggtggtagaggcagctgctgctgtggtgaaaactaacactgggtcttattgccatttgttatgtcatagttagttgatatcactaggaggcttgctcctttttttttttttttttttaaacaagggggggggggggggcccgggggggggggaaagaggataagtgtggggagggggattgggaggagtggagggagagaaaactacaatcaagatgtaatgcctgtaaagaataaaaattaaaataacaaaacagattgcatcttacagacaagcattcaaacaagccacagtctttgtagctaaagaaggaagctgagagttcccatccacaatggtaaacaggaaacagagcagagcacaagcagatgggacttcttactttcatagcctttccccagtatcatacctcttctagcaaggccacatctctgaaacctcaacctccccaaataacatcaccctctaggaaacaaagttcaactatccaagcccatggggacatttctcaatgaatccaccacagtggatgtgtggaatccctgtgagtgtggtcaggtgagtgcaagggtcctggaggtcagagagggtgtcagagccctttggtgtgggtgctgggaactgaacttggttctcagcaggaattcccagcacccccatagcagctcacagttgtctgtaactcctgttccaggggattcaagctcctccctcacctcagcgggcactgcacacacatggtgcagatacatacatgaacaccaggcatgtaaaataatataattttatataaagaaactctgacaactccctacaattctttcacagctgtatgacaaggagtaacaggttatgggggagcacactgaccatccagctgtggagagaattctctgaccttctagctgcctggaagctgtgcagagagctccagggaggaagttctatgagttgttacctgtgttggggtgggcttttcagtgatgccatccatgggttgtcagttattcctgccccagtgaataacccctctcccatgctcctgttggtgaccccaataaaacccaataacccaatggctcaccaagctggtcactgatgcaatggttactttgtcagccgtgagttccctaactgaggtgaactggtgtgtgtgtgtgtgtgtgtgtgtgtgtgtgtttccagggaaagtctgtcacacaacacagacctgtcctcacagtgtgacaggtgttagaacagttgagcagagggaacagaggcacaatttctcttctaacaggatctgctgtaggaaaccgtagcaggggaggagctgggcagacagtggggacctggggaaagcagtgtcctgctcctgaagcacactccagtgtcctcccctatgaagtcagggggatgggaagtgaggcatcctgggtcctctctgcagatgacatcacagcccttcctcctggactaacggtgggtgtgacagggaggggctggagcagcaggcagcactgcagactgtcctggaggaagacagagtggccataggtgaagaagaggaggactgtcagggatgcatgaggagggccgtggaagcctcggtaggcgatgctgagctgagctgcccactagagatgcagggtgggtggttctcagacagagggacaaagggggacactctgaggacatctttgtgctggagaagacagtgggaggtgacctcagagtcatagtctttgagaactgatgaagcacccaggatatgaggcaggatatgagggtccaagaggatggggtcaagtgtaactgagagaggcattggatggtttaatgatttcttctctttttgagacaggatctcactgtgtagcccaggctggactggaactcactatgtagatgaggctggcctcaaacttataggaatatgtcttcctttgaccccccgagtgctgggattaaaggtgtgtgccaccatgcttggcttataatgtcaaattatttgcatatatagacctgtgtgggtgtgtgcctgagaattcatggatgtggaggccaaaagaacatggcatcacagaccattgtgagtcacctgatggctgacactgaatacatgctcttaagcagagtgaactctctggccaacaggattttattttgtttcttctttaaaataaattattattgtgtgtagcgtaggcatgcggcacacatgtgttatggtatgttcatggattccagatgacaacatgtggtagttggttctctccttcccacaggtgggttccatggatgacactcaggggtcaggcctgtgcagcaagtgtgttagctgaaaaagtggaaagaggccggactggaattagagccagcttcttcagggtttagcatttactggagaacagctgagacatccagcctcatggactgaacaactattggattcttggaatttctgttcatggctagccattgttgcattaccttgaccacagcatataagtcatcctgatatatcctagataaatagatagacagatagatagatattcattaaatcatacatagttggctcctcctgcccttggaaaggctttttagttacagcacaaacagatgaacaacaaacactcatgactggccatgagtgacacatgcctttaataccagcactcaggaggaagaggcaagtggacctctgtgggttctagtccaacatggtctataaagtgaattctaggacatctaaaattacaaagtgaaaccctgtctcaaccaaaacaaaagaatagtcctgatcttagggaatgggacaattgaaataaaccctggacggaagggcaggatcccaaaccactgacaacccgagagtctcagcatagtcaacacccccccactctcgagctcacccaagcacttcagtacaaactcagagtgacttggcccactctcaacctcagagggactgtttccattaggtcaggttacagcctgggactgaactaagagaagaaagatccccaccctgcggacagcccaaaccaagctctgccctcctggtgtcccccctcattgggggacttcccaggttggccatctccaagaccctgctcctgtcaccccaaagaagacttgtcccattggagtgctgtttacaggctttcttcttctttgggatagagagtatccaaaagagaagagcctcagtagggacacacaggttttagggtgcagatggggctccctgggatctgtggttggcatcactcattcaccaagccttcaaggcacccttagcttccctcctgctgtgaccttaagttatttttcttctctccactgtccttccaggatgactggtgccactgtggatgctcagaaactctgagcccctgcagataggaccattcatgtttgtttttttttttttcttgagactatgaggttgaaggaggattctaagacaatggctgagaatgaagggtaggtgggtgctatctctgcctctctgagctagcatagcatttggctcctgagtctttgttggaaatatcgaatgagtgagacacaagaaaaagatgacagcatcacgacagagatgatcaccttcttgggcatcagatatctctactaagtcttctggagctcctgactcgaggtcacaaggctaaaagagaaaatataggggccagaacctacaaccacagttagatactgaaagatgggaaaggagagaacttccagggagggtacaggagctcaggagactgaagttcatgttctcaggccacagtctctggagtacagggtactagttgggtcttgaggggacaagaatggaaaaacacattttaattctgtcacttggggaccacaagggataaggaggcaggtaccatttacaggaacaaaaacaggcctagtcctccgtacacactaaaatgacaagaaataaacatagaagatgggggaagagtcacagacggtttgggggccacactgatctgtcacagctgccctggctgctcataatcctggtgacaggacaaggctctggccatccctgtgtccctgtgaccacagatctcagcatgtggttctaattgatgaagaaaacagagccaggaggtgacacagttgaggagtgaccatgtcacagccaacaatggactgagctccacctggacacagccctgttcacacacagttcccacagcctgatctatcacaccagatacacacagctcaatgaacacagattctgggaggttctccatgctgcgtttatttccttcacaaaactctaagtattcacaatcatttaatttacctgccaaagtttgagatcaagggccggaaccattaagttcacatttagatacttattttcagtggggacatcaggggctgcagctcagggtagcatggaggtgacaggatggagatgtcccctcctgtctgctggaacagaaggtttggctgtggaagggaacacaggcagtgcaggaacagcgtcctgctgtgcagggctaggtagccagtttttcacattgagccctaagatcacagggaacattagacactgttgctgagagtgaactgaggggccatggatgtcacacgagagggctgaacactccatcccaccaggcagctgtcttcatgctacagaacaagagtcatgaactgaagaaaacatcccaacaacccaccactcacaggtgattatgggcatccctgaaacctaattgtgtccactttgccctcccacaccccaaatcaggtctcagagtgtcaccttcacagtctgggagagacacatctgagatctggacattgtccctacccagggataaatgtatgtatgtatgtatgtatgtatgtatgtatgtatgtatgtatgtataaacaggtccccagaagattttgctggaggagctattatggatttccagagctttacaaatactccagattcaccccaagggctcagggacaatcctgctccccacactggacagggagcatagtcccctcctcttccactgtgagaggaaaagctgtgagagactagggaagtctcctaccctaggaagtttccagaattaacagcaaacccagtttagagacaggagcaatgtgggtgtatttcccgtcaacgaggcagagcacacttctgaaaggtgtagcagaattctgctggcctgactccagagtgatagcaactggcccgaaccctcactgggccaacctggcctaactccagagcgctagcacctagcctaatctatcctatgtgaaccttgtttgggagtttaccagggatacaaaagcctatgcaaagcttggttcaggaaacccagtaaaaggtggcacctaatgaactgagactctgcacttggcattatgtttttggaagactcattcaagttgttctgagcatatggtgatcaactggctaaagtgcaaatacagaaaactaaaaatgccctgggcatagggaaattacttcagtccttagaggccagagtcccctgcagccaacataaggattaattcattcttatgtgtctttgagtcttcatcctggacacccgtgtttctcctcttcttcctcgaaacagccaccacagctgtaatgatggtcacaaggagaaccagaacagcaatgactgccatgatggggacagtggactgaggaggaggctctgggaagggaaggacaggaagggaagatgagggctatgaccccagctctcagccctgaccctgctcaggctctgcagaagactccagctttccctgaccccagctctgtaccccctccctccttaccccatctcagggtgaggggctcaggaagcccctcagggtacacatggcatgtgtatttctgctcctccccagaaggcaccaccacagctgcccacttctggaaggttccatccccagaaggtctggtctccaccagctccatgtcctgagtctgttcttcctcctccctctgccaagtcagggtgatctcagcagggtagaagcccatggcccagcacctcagggtgacatcacctttaggtccaggatgatgggtcacatgtgcctttgggggatctgtgtggaagatttaagaaatcccacaagaacaagataaactgaaatctgcaaagacaaagttaaatcaatgatgacactgaactatgtctgaacacttctgactgtcaccacactagtgacccgcaggaggcgctggtccccctcatcacagatctgcacattttcctggggggacccagaagctaagaggaaagctcatgaaccagcaggtcacatggtcttccttatgtgatgttgtgtagcataagttaggtggtaaaagaatggaagaagggatggaaaacatttaatttatatatgtgattaaatatatgtcataataagaaataacgaacactggctacataaagtgagccaccaacttctgctgccaccattgaggctcaactgctgtctaagtgaacagccatgaccaaagtgtgcagcagaaatggggtgaacctctgacactcagcaagagaaaatgactccccaagccctccctctgggggtgggacaatatacaaggtgttgtcacccaggatccctggaagtgtgctgtggagcccagtctagcatttactgagatgcagcagtgctcacaggggtttgtggattttccctgtcactccaatccttgagttgtagaagaccctgtctctgaggaagttcatttcctaattcactcgaggcaacactgtaacttgttgtggttgagggagtgcagtgggggtttggatggttaattctggcaaaaaaaaaaaaaaaagtcttaaagtctaagcacacaggaatctttcttgtttcaaaggaacactgacttaacttatgtaattatccagagcatgagtcccccatggcacctgtacagactgacactcatgatagtacaaggggaggaagaaacaatatcaccccagagaagaagaaaactctctaaatgcaaaataataccttaaaaaagaaaagaaagaagaaaaattcagtttttttcagggaaccccataaatgctccttttaccactcaaggaagagatagaattggaatgagagagggatgtaaacctcactcacaggaatctgggagaatgtattctttggaaagttctagaaactgggcagaaccagcctagggtagggacatccacgtctcccatcaggtacaggagacttccagtcgtggtgtgtaaggctgacacactcagacaccgggtgtgggagaggccatggctggcagagggctgccgactgaggagccactgctgaggatgtggacatcttctctcccgccctcctgagacagatctggaactgtccagggagaaggctgagccctgggagatcagtgcaggccctgccaggctggatcaggagccccagggccactgtgtcccctcagagacaggggcgtgaccccagctgagggtctcttcttcctcaggactgagcccagcccgagggcagagggaggagatgcccgctgcccctgcacctgtgcgcagcagctggtccttcccgttctccaggtatctgcggagagacttcaagcactcgtcctccaggtaggccctgtatctttcttcataaccatcctgctgtaacatgtgctgggtgatctgcaccgccgggtccgccacggtccacgtcctcaggtcctcgttcaggacaaggtaatcgcggccctcgtaggcgtgcttctcatacccatggaggaggcgcccatctgaccccatgtcacagccacacacacacacactggtaggtgtgggaacctgtgggcaaccggcggtcagctccgcccccacgccccaccccggggtcacccgagccccgtggcccctcccacccgcagatccttaaattcaaagagaaatagggtctgcagcgaccctgattcctcaccgccctcgctctggttgtagtagccaagcgctgtcctcaggtacaatcggaaatcctgctcccagtccttggctctccatgtctccctctcccaatactccggcccctcccgctccatccacggcgcccgcggctccacagtctgagtggactttataaccagtgctcgcggcgacgttggttggttcccctggatctcgacacctaacgggggtgagaaccgccgagttgtcatctgtgtccgggcagaaggagctgacacaggtcaggagctggagaagtgaaactgaggacaggggatcccagcgctgggcgtccccacccaggacctcacctcctgggactaagactttgtctgaccctgtgctgcggacacagcgctgtttgtcctggtgtctctgagccgcctaaggccaactgctggtcaggtgactcaggatgaaacctaagagcttgacgtttctgggtaaaacacacgcagcacttaaaatgaatgttcacttaaacaggtgctgtcgcagtcccggtgagtgcgtggggccgccgtggacactgcatgggaggtgactggagttttacagctctggtcaagtccttctgacacactgtgtcatatgtgactctccgtgcaggaagcagtccctactctcctctgctttcactttttacttcagttatgtgtggctgggatgtgaagatatcaaatgaaaatgcactgaaacaaaaaaattataaatttgattttactccacactactgaacagtagaataaagttcaaatcctgtgtgtgtacctcggcgatgagaatcaacctgtgtccagtgtccacactgcagaggaacccaggagccaacacggttatcagatccagtatctcacaaacctgtgacattcgtctccctcatctcaatagctcataaagtgttagtgaagaaggtctcagagagagagagagagagagagagagaatgagagagtcacaggttatatgccttctaacacactatcatcattattttctttatagttagttacagttcctctcttactgtgtttattcactaaagcaactgtgccatggaagtgtgtgacacagggaaacatggagtgtagacagcattagtgtcctgctgtatttgttctccacttagtctctccccagtggagaaggggtccactgtgctgagacgatgacccaggtccacacagacaatctcaggactatggagtgaagacccttgtaaaacacaaccacctggagccacagatggtcatctggaaaaaacaccaggagtctgagtgtaagcacaaggctgtgtagacaggatcctgagtgaagaggcaaagtctctatttacaggggagattcctgagcatcaggcttggcaatgtgagcgccccctgcaggtggacacaggagcctggtgtctgtgggagtctgtgtggtgcttgccagccagagcttctactttaaagagaagcatctctctcccctgtatcccaacctgagtgttgccattgtattcctggaagtgacttttcttctggaaaagggtctgacttctgaagagaaggcagaggaaggatgaggagaggagaaaatgttttgagctttggatctctcctggtgtttttgttttgtttttgagacaaggtctgtctcctccattctgggggtcctgaaacgtactgtgtagaccaggctggtcttgaactcacagagatccacctgtgttttcattcaaattcctgggattaaagatttgtgtcaccacacctggctttagttccatttctatggctgtgataagacactgtgacacctacaaattataaaaggaagtgtttaatttagtcttacattttcagagggtttgagtccatgatggcagaggaaaggtgtggtgacaggaacagctgacagctcacatcttgttccccaagcaagtgttagagacactgggaatagtgggaatcttttaaaacctcaatgtccagccccaatgacacacctcctccaacaaggccacacctcctgatccttcccacacaattccatcaactggagctgaatccgtctgaacctctgaacctgtgtggccattctcattcaaacagcacagtattcagtgtggcatgtgagatgccctgcaggactctgcagatgtgtccctgagatgtgtagacagcaccctcaacttaggaggaccccactgcattaggatctcacctttttttttctgtcacctcctgcccagcccttctctgtctcctcaggcctcaccccatcagtgcccagcatgtctcacttgagctctgcactaactctgtctcttcttttgcatccagtttctgtggtcagccatcttgtcagccatcttgtcagccatctttctgtgagccaggctgtgtggtttccttctgtaaaagccccaataggggctggagaggtggctcaggagttaagagcacctgttgctgttgcagagcatccaggttcagttcccaccacacacgtggtgcttcacaaccatctatgactccagttccaggtgattcagtgcctggtcgtcctgcatgcttcatccctctctcctagagtgtgccacctaggggctgagggcacagggctatttagtcaacactgaaccagtagccagtgaaaccagagctggaacaggacaagcaatgatgactgaaatagactgtgctgaaatgaacattagcaaaacagcctaaaactaaaaacacagaaagatttcattttgtgggcctactgtgcatagtggaccacggcctcattccaggaagaagacactgtgtatgctcttccgtgcacttgagccctgtgctggttgttgattgctgatgaacaagagacctttcagccagtcacttaagtagtcacttgtaacaggctatgacatccccaacatgccaagagtccctgcagccagtgatgtcccctgtcccctcattttccctcccacgtgagttcctccagggtcttgtctttttaatacaaaagggaagcatcagagtctatggcaatagttcaatcctttagagaaaagaaaaccaggtgtctatgtgagcccacagaggataaagttaaagagaaggaaccatggccagctgagctgctccatgacacaccccccccaacacacacaccactgtgagggtctcagtctgtcttgctctcatcaaacttacagcagatagaaatttccactctttttttacctgtgggaagaaaactccctgcaagagggtagggaaaatgcagagccctgagggccaaggcttggcactaggggactttccagaactctgaaacagactgtgatatctattctggtttgtcaccatgactatatctgaaattgactaaaacccaaaactggagggtacacctgtgagggattgtgtgtgtgtgtgtgtgtgtgtgtgtgtgtgtgtgtgtgtttaatttgaaatgggaagatcaacttctgatctggatctttgaggaagaacgataaatacagttgaactttctttggactgccaacttctgaataatgacaaggagactttttactaattatgaaaattgggccatagcttaggcttgttgcctgctcactcttaaaactaaattatccctttatattaaactgtgttctgtcacttggctcaatacctctcctcactaagtctaacttacacatcctctggctggtgaataccccctgcctttgattccttcccagagtttctctctctgccaggaagtcccccatgttgtcctgcctaggtattgcctatttagctctctgttaagctaatctgaagttcctttggcaagtgaggaaggacagaaacacattttacaaaaagatcctactagacaaacatttaatccccatatttggagaaagaaatatcggtccctaatgtgagccacatgatctactgaaaatctatataaggacatggaagaaggaagcttttgctttttgcttgcttgttcttgccttgctagactgtccattccttcatggcattagaacctacttctttgggaatcgagcatatactgaagaccagctgagccaggaggtgaatgaactgaggagtgaccatgtcacagctgacaatagactgagctccatctgggcacagccctgtgcacactcagctcctacaatcccatcctgtcccacaagatatacacagcatgatgaacacatatctgggaggttctccatgctgctattcatttcctccacagcatctaagtatctcatgaagttatttaacagccaaaaaacctggcagatcaaggatgagaacaatcaagttcaaattgagatccttattttagtggggaagtcaggggtgcagctcaggacagcacggatgtgacaggatggagatgtccctcctgtctgcttaaacagaacaattggctgtggaagggacacaggcagtgcagagacagggtcctggtgtgcagggctgtgctgggctcccagttcttcacattgagctcataggatcacagagaaaatcagacactgaagccaagagtgaactgagtgaccctggatgtcacaggagagacctgaacacactgtctttcactccatccatgctaggcagctgtcttcacactacctgaataagagtcatgaacaatcactgtgaagacaacatcccaacaatccaccactcactcacaagtgattctgggagtccctgaaacctaatcatgaccactttgctctccccaaacacaaatgaggtcccagagtgtcaccttcacagtctgggagagacacatcagaactctgggaactgtctctgaagttcatattcataagaaggtaaaaacaaggcccctagaagattttgctggagaagctaataaaggttagaagagctccacaaatactccaggtccaccacaagggtctaagggacaatcctgctcccttacctttagctggagcatagttccctccttgtccacctgtgagaagaaaagctgccagaggccagggaagagcctgtacctaggaattttccataaccttcagaagacccaggtcagacacaggagcaatgggggttgtggatgtgtttccatgaggcagagcacacttctaaaaggtgctgagagagaacttagaccctgccctttcctacctgtgtttctcctcctcttcctcacaacaaccaccacagctgtaatgatggtcacaactccaaggagaaccagagcagcaatgactgccatgatgggaacagtggactgaggaggaggctctgggaagggaaggacaggaagggaaggaaaatgcagagccctgagggccaaggcttggcactaggggactttccagaactctgaaacagactgtgatatctattctggtttgtcaccatgactatatctgaaattgactaaaacccaaaactggagggtacacctgtgagggattgtgtgtgtgtgtgtgtgtgtgtgtgtgtgtgtgtgcaccaccacagctgcccacttctggaaggttccatccccagaaggtctggtctccaccagctccatgtcctgagtctgttcttcctcctccttctgccaggtcagggtggtctcagcagggtagaagcccagggcccagcacctcagggtgacatcacctttaggtccaggatgatgggtcacatgtgcctttgggggatctgtgtggaagatttaagaaatcccacaataacaagataaactgaaatctgcaaagacaaagttaaatcaatgatgacactgaactatgtgtctgaacacttctgactgtcatcacactagtgacctgcaggtggcgctggtccccctcatcacagatctgcacattttcctggggggacccagaagctaagagggaatttcatgaaccagcaggtgacatggtcttccttatgtgatgctctatagcgtaagttaggtggtaaaagaatggaaaaagggatggaaaataattaatttatatatgtgatttaatatatgccataataagaaataaggggcacaaattacataattggtgccaccaactactgctgatacccttgaggcacaactactgtggccatcttgctgaccaccagcattactgtctgtccaagtgaacagccatcgccaaagtatgcagcagaaatagtgtgaatctctgacactcaaagagaaaatgactccccaaaccctgtctctgtggggacagaatgcaaggtgtggtcagtcacccaggatccctggaaatagctgtggagcctagtgcaacactcactgtgacacagcggtgctcacacgggtgtgtgggttttccctgtcactccactccttgagttgcagaagccccagtgtgtgaggaagttcaactcctaattcactggggcaacattgtaacttgttgggactgagggagagcagggggctctggatggttaattctggtagaaaatagttgaaatcatcagaatttttctcctttaaagggaacaccgacttaagttgtctaattatccagagcattagtccccatgacacctgtggagactgatacccatgatagtacaaagggaggaagagaagcaatagcaccatagggtggaagaaaaactaaataaaagcacaatggcaacttcaaaaaaaaaaaagaaggaaagaaagaaagaaaaaaagaaagaaagaaagaaagaaagaaagaaagaagaaaccccacaatttggaattttcccagagcaccctataagtgctcacgagaccattctaggatgagatagaattggggtgagggaggggtgcaaacctcacccacaggaatctgggagaatgtattctttggaaagttctagaaactggggaaccagccttgggtagggacatccacgtctcccatcaggtacaggagacttccggtcctggtgtgtaaggctgacacactcagacaccgggtgtgggcagagaacccggcctgggagaggccatggctggcagagggctgccgactgaggagccactgctggggtgtgggcatcttctctcctgccctcctgagatagatctggaaccgtccagggagaaggctgagccctgggagatgagtgcagcccctgccaggctggatcaggagccccagggacactgtgtcccctcagagacaggggcgtgaccccagctgagggtctcttcttcctcaggactgagcccagcccgagggcagagggaggagatgcccgcggcccctgcacctgtgcgcagcagctggtccttcccgtgctccaggggtactccaggtatctgcggagagactccacgcacgtgccctccaggtaggccctcattgtttctgcaaaattagcctcgtcccacttgcaccgggtgatctgcaccaccttgtccgccgccgtccacgtcctcaggtcctcgttcagggcgacggtaccctgacggtacccgcagaggaggcgcccatccgaccccacctgacagccatacatcacctggatggtgtgagagcctgccagagcagggagatgcggtcagccccgcccacttgcccctccccacggctccgcccaccgcgcatcctcggaactgacagagaaaccagtgccaggtcccactctcctcctctcggacctcggacttgggaccaggggcgactctggcccttacgtggggacgtgaaggtcgtgacctccggcccgggggtcactcactgccctcgctcttgttgtagtagccaagcagggtcctcaggttccttcggttaatctcctccttgttcttggcgatccgcgtctgcccctcccaatactccggcccctccggctccatccacggcgcccgcggcttcatcctcggattctccgcgtagctgtcgaagcgcacgaactgcgtgtcgtccacgtttctgacgacagtgaaccggggctccccgaggcctggccgggacacgatggtgtggaaataccgcatggagtgcgagcctgggggcggcgcgcggtgagacccagaccctcctcccgggaccccgggcgggtgagcgggccgggaggagagcagggcgcggggcgcgggacgcgggtggggaaggggcgagagtgtccggctgggcgatgcggggacgcggcttccccggtgccgcccccgccctccccgaagagcccgtttccctcgcgacccagctctcacccgcgcgggtctgggtcggggccagggcggccgccagcagcaggagcagcgcgcggtgccaccaaccccatctcggatctgggcgtccgggttccgcggtctgcatggactttataaccagtgcccgaggcggctctggttggttctccaggatctcgacacccaatgtggtgagaactgccaagtcttcaccagtgcccgggcagaaggagctgacacaggtcaggagctggagaagtgaaactggggacaggtgaaccccagcgctgggcttccccaccccagacctcacccgccagggactaagactttgctgaaaacacttaaaattggaataaagtgataagaacgcagctttacaatagcttggggctaatggaaaggccggataattcatcctgtttgaaagctgggacttcatctcagagtcctcggaactccacaggaggtctgtgggaaaattcaactgagaagttgaattttctgcttgctgccatgtagcaaaccagcaaagctcagcctctggagacaccaagcattcattactccccacagtgtgtgaccccaagagtccctgggtgatcctggcttaggacctctcccaggtcacagttcagttttctttctctctctctctctctttcttttcttttctttctttttctttttctttctttctttctttttttttttgttttttcgagacagggtttctctgtgtagctttggagcctgtcctggcactcgctctggagaccaggctggccttgaactcacagcgaggccacagttcagttttcatcctgctgtgtttttttctcaaggcttcaggagagccagggttgcatgagatgtggcttcctcgtaggccagctggaaagggctcagcttcctgcccagagcaccctataagtgctcacgagaccattctaggatgagatagaattggggtgagggaggggtgcaaacctcacccacaggaatctgggagaatgtattctttggaaagttctagaaactggggaaccagccttgggtagggacatccacgtctcccatcaggtacaggagacttccggtcctggtgtgtaaggctgacacaagaatgtgcaacgtgctcaatatccaatcccagatcacaacttactgcttccttcattaggggaggggatgggaggggagtgagcaggttctgaacaccctagagtgccaagttcctgctacaacctgtgttcaggtcgtgtgtgtgtgtgtgtgtgtgtgtgtgtgtgtgtgtgtgtgtgtgttacatgtgagtatatgcttctgtgtgtttatatgtgtgtgttccactcactaggcactcttcttgaaggtgctgaataattacctcagcttctgccccttctgtgtgttctttttcacccacatcataagacctccaatggtaaaacataagatctcagctccaagggcagcaccaacaattgtcatgatgatggtggtggattgaggaggctctggaagaggaaaaaatgaagggtgtagaagggtgactttaccttcaggtctggggtgatgggccacatgtgtctttggagggtctgaggagaagagttggaaagttcaagtgtttgcaggggactccagcagggtccctgtgaccatcctgggattggtcagaaatggggtgagggaggggtgaaaacctcttctagcttagacacagggttctggataatctcaactttaggaaattctagatatgggtgagagagtccagggtcactgaactctggtgtcacatcaggaaaaagggacttctgcttctgactggtgagtggggctgatggattcagcatcactgaattcagaccccagagaccttgggtgtgggcagagagctgggcctgagcaagatgtggcccacacaggactgcagactgaaggttaactgtcttggtcatttcagggaccttctctccttctgtcccaagacacactctgaactgtcctgtcagaagcatgagccctgggagagccagtccctggtaaagggtcaggagaccctattaaactttccatctcccatatttgagagatagagaaacaggtcattattatgtgaaaaggagagacatccacagtttctcctaaagccaggaaggattcaaggatatacactctccacccttgtatttgatacagtggtgattttatatgagctgtcaatagacagaacttttgcataaaagggatcaaagtaggaaaggaagaagttaacactgtccctatttccagacagcatgatttttttatatatataaatgaccctgttgagtccatgggaaaccttgatgggatatatatatcccagttggactgcagacaagggactagagcctcagtttacagagactgcagaaactaaacaccaaggaactaacattgtcgatttacaaatgggtgagggaactgaatagacagttatctttttttccccaatagattaggaagttagggcagtcactagtttcagctaaaatacagcccaaatatatatatttggggcaaacagtttacaagtaatataagtctgtaggggaagctgcagccacgcctacttaggggctggctacaggcgtgcctgaccatgcttgcgagggcgtggtcagggtgatgtagaggacactttcaggggtctgcgtttctctttcggtttcacttttgtacttgctggacagactgctgccacgccggttggctaggttgctctgtaagtaaggcttttcccttaatattaaatacccttatatttctacttggctccgtattggtaatttcccactatagtaggccagctagaaactcatataggcaatgttacccagaaattagatgcaaaggtgcaagatacccaggatagggttgaagaattggacaatgccattcaatcaattattgaagcatccaaggtagcagatcagaaatttgagtctagatttgaatgtttggaagataatttacagtacagggctgacagattacataggtccatacggtcgattgctgaggactcaaaatcagcaaatcatgacatcgaatctagactccaatacctagaaggcagtttccatgccatccagatgctgtctaaggatgatcgtatgaaagacctagaaaaacgtgtagatgagcagttagagcaatttacagattcactaacgtgcttggaatcttttatgattaaggagattgaaacttttcaaaaggatatcattgctaggcttaaagatcagtgggatgcctcagaagcagaatcactccaatcccaggcacctactccacccaggtatcgtgactattcttctaaggttgttactcgtacaccattagtgtacccagctaccatggtagaaaagccagcttctaagaaacaccctcatggacgaatggtttatgaatggcaacctatacaggctcatggtcggatgacttatgaatggcaacctatacagctgaaggatcttaagaatattaaagaatcagttgtctcatatggtctccatagcccatacgtaaaacagctattacattcatgggcaacctttaacagggtgacacccacagattgggaacgattggtagcagctgtacttgagaattcatgccaaatccagtggaaggcattggtaagggaagaggcaaagctccttgaacgtcagggcataacggaaggttttgaagaccccctagataagattcttggtcagggtatttatgctgacccacaggttcaggctgaatatgatgacgatatactgtctctatgcaggaaagtagcattaaatgcctaggataaggctcgtgagcaaggagaacgcctagaagcttataccagaatagaacagggacctacagaacagttccaggacttcttacaaaggttaactagggcagtagaattacaggtaacagatccagaaacaagacaatcaattatatatacaatagcttatgaaaatgcaaaccctatatgcaaaagaatacttttgcctttaaagatcagatcagctccgttagaagaatgggttttgtatgcagccaagtgtgattataatgtgcaagatactggagcttgggtaggagaagccattttgaaaggtttaaaaaggcaacaggaaattaaaagttctagatgtgagaatgcaagagcttgggaaggtgaagcaccttacagaggtcaacataggtacaaagaggctagaggttactactactatgaaccagaaccttgggtaggaagagccttcccctggagaccacgaaggctccaggaacctagatgtttcaactgtggtaaaatgggacatactaagagaaattgtagacaaatgaattctaacaatgcctcatatggaaggccactgccttctggattgtgtagaagatgtggtaagggcagacactggaccaatgaatgtagatcgaccagggacatacaaggaaaccccttaaggtcgggaaacccctgctgtgaaaccccgaggggggactcaagaaggcccccacattaagaaaggtcgggccattccaagtagcagtgggagacaatctctcacaggaccaatagatagttctttgcctattgtgaaaaatgatactgctctagatggtactttgaatagtgatgaagaatcaagtgtgaatggacaaaatgagtaacacatattttggcaagcttctattaatgatcaaaggcctcagttgaaagtgaaaattaataacaaagttatttctggcttagtagacactggggaggatgtaactattattannnnnnnnnnnnnnnnnnnnnnnnnnnnnnnnnnnnnnnnnnnnnnnnnnnnnnnnnnnnnnnnnnnnnnnnnnnnnnnnnnnnnnnnnnnnnnnnnnnnnnnnnnnnnntgttaactcagtggtctgcattggaccggaaggacagaaagggatactgaaaccatatgtggcagatatagctataaatctctggggtcatgatctcttacagcaatggaatactcagattaatattcctccagtgtcagatacaaattatgtacaatctttagatagtagaaacgatctgataagatgctatggaaaatgtttaccaaccatccatactgtacagaaactaggtacaaatgatggaactttagaggagccaaaggcnnnnnnnnnnnnnnnnnnnnnnnnnnnnnnnnnnnnnnnnnnnnnnnnnnnnnnnnnnnnnnnnnnnnnnnnnnnnnnnnnnnnnnnnnnnnnnnnnnnnnnnnnnnnnnnnnnnnnnnnnnnnnnnnnnnnnnnnnnnnnnnnnnnnnnnnnnnnnnnnnnnnnnnnnnnnnnnnnnnnnnnnnnnnnnnnnnnnnnnnnnnnnnnnnnnnnnnnnnnnnnnnnnnnnnnnnnnnnnnnnnnnnnnnnnnnnnnnnnnnnnnnnnnnnnnnnnnnnnnnnnnnnnnnnnnnnnnnnnnnnnnnnnnnnnnnnnnnnnnnnnnnnnnnnnnnnnnnnnnnnnnnnnnnnnnnnnnnnnnnnnnnnnnnnnnnnnnnnnnnnnnnnnnnnnnnnnnnnnnnnnnnnnnnnnnnnnnnnnnnnnnnnnnnnnnnnnnnnnnnnnnnnnnnnnnnnnnnnnnnnnnnnnnnnnnnnnnnnnnnnnnnnnnnnnnnnnnnnnnnnnnnnnnnnnnnnnnnnnnnnnnnnnnnnnnnnnnnntttatcattacatggatgacattcttatatcagattccaataaagaaactttggaaagtatgtttgaaatggtgaagaaagttctgcctcgttggggataacagattgcctgagaaaatatacaaagaggaaattctattaactattcaggttacaagatagacttacaaagaatcagacttcaaaaggtacaaattaggagagattgttatcaaactcttaattctattcagaaattattaggggaaatttctcaattacagatgattattgatgtagaaggacatgacctaaaacatttaaaaatggcccttaaaggtgataaggacctaaacagtcctagaatattatctgcttaggcagaaaaagggttacaatgggtggaaaacagaatattggatgcacatgtagatcggataaacattgatttagactgtattctggttatcttgccatccagagaatacccttctgggattctgatgcagagggaagacactatatttgagtggatatttctgctacataaacataataaaaagttaaagacatatatagaaatgatttctgatttgattctaaagggcaaattaagactttgtcaactgattgtaaaagatccagcagaaattatagtacctttaactaatgaagaaatttcatccttgtggaagaataatgaatattggcaaatagctcttactgacttttaatcaattatatatacaatatcttatgagaatgcaaacccaatatgcaaaagaatacttttgcctttaaagatcagatcagctcctctggattcttccacgtattgtaagacaaactcccatttctggagttcttaccttctacactgatgccaacaaatcaggtaaggcaggttataaagcaggtgaggtaagtaaagtagttcaaagtccatatacatctgtacagaaggcagaattatatacagttctaatggtacttatggatttcacagaatctcttaatattgttactgattcccaatatgcagaaagagttgtgttacacattgagactgcagaattcattcctgataatatgcaattaacttctctgtttttacaattacaggaaactatcagaaacagaagtaatcctatatatatgaagtaatcctatgtatattacacatatcagatcccatacgggtctgcctggcccactagcacaaggcaatgatgagattgatcgtttattaattggaagtgtgctagaagcctcagaatttcataagaaacatcatgtaaatagcaaaggtttgaaaaaggacttctctatcacttggcaacaagccaaggagatagtgaaaaactgtcctacttgttccttttataatcaaactccattgccagcaggttttaatcctaagggcatttggagaaatgaggtttggcagatggatgtctttcactttgcagagtttggaaatttgaaatatgtgtatcatactatagacacattctcagggttccaatggactactgctcttaattctgaaaaagctgatacttttattacacacctgctagaggtgatggcagttatgggtacacctgcacagataaaaactgacaatgctccagcatatgtctctacaaaattagaacaatttttcaaatattataacataaagcatgttaccagtataccacacaatcctacaggacaagcagtagttgagagttgagagatctatctaatcgaacacttaaggagatgctcaacaaacaagcttggaagactaaatcccctaaacattggttgcataatgctttattaacactaaactttcttaatgccaatgagaaaggacaaacagctgcagaaagacactggactatggagaaaaccgctgaactgaatcagctggtatacttcaaagatgtactaacctcagtatggaaaccagggaatgtgttacattggggtaggggttttgcattggtttctacaggagaagaaaaactttggataccatcaaagttggtcaagattcgagttgaaaaggaaaaacctctcaacaaggagaaatgacaggtattctnnnnnnnnnnnnnnnnnnnnnnnnnnnnnnnnnnnnnnnnnnnnnnnnnnnnnnnnnnnnnnnnnnnnnnnnnnnnnnnnnnnnnnnnnnnnnnnnnnnnnnnnnnnnnnnncatgggtagatacttaagaagaaaaggtagctataaccaaacaaaaggaacgtgcctatatacggtaaactttacagctgtctctccgagaactctatttctcttcatttgctagttcctattcaattaaaccaatgctggatttagaggtggatttggctttcctcctctaaaatccaagcatgttatttaactaaactttagtgtttctgtattgtatcaagaagccaattgatgtaatacagaataaaagaagaatttggggactgtctttgtcttttcttggatctttctctcaaggtgtacaccctctcataattgttatgctctcatggttgcagtccccagcatgtgtacatacacaagcaaacatttctctgctaagtgtttatgtttgagtcccacacagccaatgaagacctgcctgacagcaatccctggacaccctggaaagaaaatgggccatacctccttgcctgcactggatccaacttgctccatttcaacggacactctggtcaaagcttcggatactgacttcaatcaagttgaggatttcaagcgagaccttcaatcaagtgaatcccatctaacatggactggatacaatccattcaagactttcactaactagtactaaaatactaacattttcttcctgcttaccttcaggtacatcttactgtccttacccacccccccagtatctctcccagttattttccttctcttgcccttagacccacctcaggagggtgggaccaacccttagtaaatctctctattctgaaccttcacccaagcaatgagtttcttggaaaagaagcatgcaaccttatttcaaatgacctatcttaagggaacccaaatgtcatcctccagccctaatgtatttcccagtcactcagtcatctatgtttatgcctggtataacttagagattaaagtattattacatgacttcttcctttcccttctcttctttctctgataagaattcctcaggctatcaccaacacctctccccacctcagagcggtgcctccccacccaaaccatggatgagctgaaaaatctctccaaggccaagacgtagagtgagattttcaggggactgcttttctcttttggtttcacttttgtacttgctggacagactgctgccatgccggctggctaggttgctctgtaagtaaggtttttctctattaaatacccttgtatttctacctgactccgtattgttaatttcctactatataagtctctgtgtgtttatttaggaaaaagtgtctgtgggaccaggtggacagaaactccatctaccaaagctcttggacctaataaacactcatggttgtcagatacaaaaatcaatataaaagtaaccttcatgccaggtgttggtggtgcacgcctttaatcccagcactgggaggcagaggcaggcagatctctgtgagttcgaggccagcctggtctccagagagagtgccaggataggctccaaagctacacagagaaaccctgtcttgaaaaaccaaaaaaagtagcctttattcatgccagcagtgtattttagaaaatgtacaacattcaaagcaactgcaccagaatcaagtgtttagagatatatctaaccaaggaaatggaagaactctacaatgaaaacttttaagatctgacacaggaaatcatagagacaatgtcagaagatggaaagacaacccatgctcctggatgacagagttaatactgggaaagtggtcatactacccaaattaatctattgatttattgtaatacttttaaaatgctgatatattccaaagctttagaatgaatgaatttgtatggaatgacaagagaccatgtacagccagacaatcttaaggtgttctactcccaaccttagtgcagagctagagtgagagagacagcctggacctgcaataaaatagaaaaatcaaagacatagcatagagttcctggatataaaatgacaaagctgtgaatatttaactttcaatgatgaatgcaaaagccatgatgctgcaacacttttttttttaactgagaagatgaatttaggttctcacctttcaccttgtacaaaagtaaacttgaaatagaacaatgaccttgttaagtccaagagttgaaactcccagagctcaagaatacaatctaggggaaactcttccagatactggagtggataagaacctcagaataggacaatagcacaggagctaattagatcatgcgtcagcatgaagataagtctcttcacagcacaggacacaatcagcagagggaacagaagtcacaataagagaaacctgtaccatctggtctgcagtcaagggactagagcccccagtttacagagaactgcagaaactaaataccaaggaactaacattgtcgatttacaaatgggtgagggaaccgaatagacagttatcttttttgcccccaatagtttaggaagttagggcagcactagtttcaactaaaatacacctgaaaactgacaagtgatcacatacaataatgtaaagtacattttatttgaaaaataaaactcattggaacaattctgaaaggttcattagaagactggcagggtatccatttaagacatagacagtttgtttcagcccccttcaagtcagttgtctagaatctaaaactcattttctttacctaagctgagagcttcctagcatgtaactgtgttatgaagaaagaggactgaggtgaaatgtgtttaccatcagagctgctccatcgtttgcctaggatctcaaatgcttcatggaatcctgggaaatgttcatgcataaggatattgcctgagctgacttaaattgctccatgaattggtgcattattaacccttagtgaagccttaaaaaaaaaaacaaaaaaagaaatcaggttgaaaactgggttaaaggccagggcggtggtgacacacgcctttaatcccaacacttgggaggcagaggcaggcggatctctgtgagttcaaggctagcctggtctccagagcgagtgccaggataggctccaaagctacacagagaaaccctgtctccaaaaaaatgggttaaaggaaacaaatacagcatctgcttttagaggtatcaactcaggaattttctcaattatgaaatctggcagaaggtatgtctcaaaatccagaggataacaacattcctaactccagatctggcttttttcttttcatcatgactgtcttatgactcaccattagctttctctacttctggtaaatctgcatcttcatcaccacccatgtgatccatcatctcagaaaaacggtcaaaattggacatgtcttcaacgaatcatcctcccagtctttccaattgttgaagtccacactaagccacttaagctttgcccttcctttgttaaccaaggccacaaggggccagagtctctttctgcaaacaacataaaattgatctgtctatcttcccctcctcccctctacagggtttctctttagctttggagcctatcttgggacttgctctgttgaccaggctggcctggaactcacagagatcctcctgcctctacttctgtagtgctgggtttaaaggcatgccccacccccactcccacaatctgtccattcgtttatgcttggaatcatttgaatcaatacagtgaaaaagatccatgtcgtttaaaagcttaaattatcgcttctccaagcaagtttggatttttcaaaatccacactaacatctttattgtctccaacacaaaattcaatgaatacataattccttggatcctaccactttgcatacacagctagcgaaccgggaagggaggcaggtaaatgggtggcggacatccctgacaagcctcattggcagctgtggctggctggtcgactccttttgggagggtcgcccacgttttctgcccattagcagcctcttcttgctcctctaaggcaacagcagtggagggctggcacccagaatgcacccagtggagagcagctccctcagtctatgagaagaggaaagtaggacaaggggctcaaagatggagaatgagagtgcctgcgtgcaaagggtggtgaacctcagttatcttaataaaagataaaagcacaaaagtccattaatatctttagtgtgttgagtatctccagccttcatgaaaatacagactaaactacttagaagggctggagagttggctcagaggtgaggagcacttgatgctcttgcagaggacctgggttagactcactgtatgtgactcagtcccagggaatcacacacgctcctctgaccccacactcaaggtacacacggtgcacatgcacacgtgcaggcaaaacactcatccccataaaagaatgaaataaaaatgaaagttaaaactgctttgtgatagcacctcacccagtcagaatggctgtcaccaagaaatctgacagtaaatgctggagaggacatggagaggagccaatactctctcctgtgagtgtgtgtgtgtgtatgtgtgtgtgtgtgtgtgtgtgtgtgtgtgtgtgtgtgtaagtcaattttgacatttctcaaaaaaataatacaattagacccactgactgtcacacaggaaaaaaaaaaaaaaacatttcaaaaaccaaaacccaaaggaaacaacaacaaagaaaatagaactagcatatgactcaggtaattttacttctgggcagaagtccacaatctactggtgggaattttgcaccccgtggttattgctgctttattccctagagccaagaattggatgtaatccagttgtccatcaacagatgactagacaatgaaaaatttggtatacacataaaatggaataccattcaaggctctcaacaatgtaatccgaaaatactcaggaaaacagatgggtgtatactattaaccgaggagacaatctcagaaaaaaaaaaaaaaaacaactacattgtttttcttggtatgtgggatatagacaacaatatatggatatatctaaacaagtgtacatttgtgtacagtgtagcaagaaagcctaatactggaagatgagaaaggactgaatgaaggttatttgacttgagtcatgaaacaggttataaagctaattgttttctagttttaaatctgtcgtgaattttcattctttttatttttttccttattgatgctggataaattcgtgaattatatttgataacgaatttgtaaaatccaaaccgaatctccacaagttcatggtgtctactctaactgcatagaattaaactgagatgtttagcttttgttctggctaatttcagtgttggatttttctgcaataaagtttcaaaaacttaaaaatatgaagaagagacaggggcatgaccccagctgaggggtctcttcttcctcaggactgagcccagccccaggacagagggaggagtttccgcgggcccctgcacctgtgtgcagcagctggtctttcctgttctccaggcatgcgccctccaggtaggccctctgtccatctgcaacaccagcctgctcccacttgtgccgggtgatctgcgccaccatgtccgcccctgtcctcgaactcaggtcatcgttcaggtagatgtaatcgtcgccttcttaggcgaattgaaggcacctgcgaaggaaacgaccatctgatcccacgtgacagccagacagacgctggaagttgtgagtgcgtgcgggaccccatggtcagttccgccaatctgcaatttctctaaactgaaagggaaatctggtcccggtctactgctttccagcatctctgggattgcgcagcctcagggtcaatctcggatttgggacccgggcgactctggttgtagtatccaagcgcgatcctcaggttccctcatttaatctgcgcgttgtccttggcgatccgtgtctccctctcccaataatccggcccctcccgctccacccacagcgcccgcggctccatcctggcattctctacgtcgctgtcgaagcgcaggaactgagtgtcgtccacgtagcggacagagatgaacccgggctccccgaggccggggcgggacaccatggaggacaggtgtgcctgaccatgcttgcaagggcatggtcagggagacgtagagtgagacacgccggttggctaggttgctctgtaagtaaggcttttcccttctgagcgtccgggttcctcggtctgcggactttatacccggtgcccgcggacgctgattggttccccgggatctcgacacccaatggggtgagaaccgccgagtcggggcagaaggaactgacacaggttgggagctgaagtgaaactggggacaggggagccccagcactgggcttctccaccccatacctcaccgcctggggactaaaagtttgtctggaacactaaccatgtgctgtgggacagacagctgttttgtttggcttgagtcgctgagaccggaattgaggagaggcctatgaaatgaaggtctatttcttcatctcctcccaccttcttcctcctcctgttcttcctatactaagactggagtcttctgggagaaagatctggcaaatgcagtagaggggtagatttttccctccctttatatttttattttatttttttaaaaaaactatatttaccgtgcgtgtatgtctctgtgtgttgccatgttctgctcacaacacacacgtgtggaggtcagaagacaacttgcagaacctggtcctctccttctactggcaaatgcttttcctaaagagccattctgcaggctccatatgatttctctttaaagctcgaagagttcgcccacaaataccgtagagacctggttcctgtgttcatctgcatgagcgggccacatgccaagcctgactggttactgtgtcagctgtgcaattgagtttgggctcttcacaatgtttctaaacaagctttgcttacaaaacttagcaaacgcctagtgtttctttgcaaaggaagcaaaagtgtctccaggtggttggggtttacagtgattgtaaatctcaccctacagaccagagatggtctgtgtggattcaggacgttgtctcaggacagcagaccccttgtccacgggaaagagacaccctgtgagtgcctgaatccagcaccacactgaaccttgtttgcactctgtgtttccctagtgcacacacttttaagataaatcttaatgaattaatcactctgataaatgaactatgtaaaacatagcacaccacacttaaatttctgtgaatcccgatatctttcagaatgtctgacctgtgccttcctcacacttgtggtgatgtgagctgacagatgggctgctgaggggaggggcagtacctctcataactgagttggttcctgagttcctcaagcctgagcactgtggacactggtcatgaggttggatcttgtcctaagtggggcaggctggtggccaggtggtaaatttcaatggtgcagatcttttatttctgggatttattgacttgaccttttaatttttaggaactgaaaacagaggctagtgggaactagtgtgcagagtcacatggcagcacagtttgtcactgtgtgctccgaccacagctggagaagttagtcatctaaaggttcaaatgtccacagcggccctgctggttctaggcattgcctgttctacaaactacacacacgagaagctatgcagacttactggaaaaactcaagcctactttttatcctgatcaacacaaagagatgttcctaggcagttctgtgttaactaagaatgtatagggagcatagctaggctcttcagatgtgtccattaaaattccatgaagtagggactgcagagatggttcagcaattaagagcacttgctgctgtgctgaggactagggtttggttctactgcctgtgtggtgactcacaattgtctgaaacccagaacccaacttcctcttttggtcactctggacaccagccaattcctcttctggaccattctgggtataccagataggtctgtgtggttaaaaaaaaaatctacacacatacatgaaggcatacacttaaattttttttatttagaaacaatcttattttacatatcaatcccaatggcaaacacttttatatgcattaaagaaataaagaggtcattacaattttcatagcttggcctggtggcacatgcctttactcccagcactcaggaagcagaggcagatggatctctgatttggaggccagcctggtctacatagagagctcaatgacagcccaagtgacacaaacagattctatgaaccacccccacaaaattcataacaaatatataaactatactggaatctgatgtttctattattgtgaattctttatgtttggttccttttgtgtctccccggccccctggcttcccagtcctcctctctgtcttatcattagagaaaaagagtgtgaccatccactctctctgaactgtagtagtgatccatggctgcatgtgctccactcaaagatcagcagctgaagacatgaaccatgcatcacctcccactgtgtggcagccaaccatctagcatagctgttctgtctgcttgcactgagattagaggagtggcctctacaggtcgtctttgggagatttacacaatgtgtattttgggcatattcatcccccactcacccctccaacttctcccagatctgcctcaacttccctactctcccccactgcatgtctttttattatttcttttcttttttagaagagaccatctcacagcagggcttctggtcccctggttcttacactcattttgacccctcttcctatttgttcctgagccctaagcgcaggggtggtcttgtaaacatgttgtctggggctaggcaccccatgaccaataactgcattttgactagttgtggctttttgtaaagatcttggttaatgtaaaagaagtttctttgatgagggatgagagctacacttatctgttgctgtagtttttctttcccacctggtcccatctagctcacagccactttgtcccaaataagcacacagacatattagttattaaactgttggccagggctccttactggctagctctatcttaattattaacccatgtctattaatctatgcattgccacaaggctgtggcttacccataatccagcatgctcttttgggcagcatgtcctctcctcctagcctctttctccctctccccaagtatcctcctcatctcctagccccgcctatcttcctgcctctattggccagtgttttattcatcaaccaataagagaaacatacatacataagagcatcccccatcacttatttgtgaaaataaggatacaaattctgttcttagcccctacttaccctgccctagtcgtccgcatctgttgcatcagggaagattctgtgctaggcctgagagaggatgggatcacagcagcactggcaacaatttaaggagaacagaaacttttcaaaccatcctggagtgctgggtagtaaaggtaaaagggccagaaaatcttgcacctctattgaggtcaaggctagcgctgggtgcacagctggctcccctgagcaagtttgtcttatgatctcaaatccagtctccagaaacagaagggaatggtgggggagaggaaaaaagtgtgtgttttcaaaatatggagaagacagggatggtaatagcactgggtacccacctcctctagcctgctttccaggttgccatctccttcagtaccttgagcacttgtcagaaagtgagctgctgtgcagggcataggtcttttattttcattagaccaaggagaagaatggagctgttctggctttgtgcaccttcttcttcttcttcttcttcttcttcttcttcttcttcttcttcttcttcttcttcttctccttcttcttttggttttttgagacagggtttccctgtgtagcttgggaggctgccttggaactagctcttgtagaccaggctggcctcgaactcacagagatccacctgcctctgcctcccgagtgctgggattaaataaaggcatccaccaccaacacccagctttttgcaccttcttgaaaaggggtggaagtgggatgagagaagaggcatttgcttatcaaacgtttatggaagtaataatattcatgggcaggtccatgccctgaaaacacagacattctgccagtcaccacaaggagaaagaacctgctgcatagatgcccctgaaaaacaaaacccccaaacaatcttttcaagttcactgtttagaaaattcagagactgcatgcagaatccaggagccagagtttgatgcaaacctgtccccatgctacctgcatgcccactccttcacacagcttgcagtctccccctgtccttaaagcaaagagtgggtcccaactgtgttatcccagcttggtacccatacttggactccttcattcttcctgaaccttgactgcaggtagtcagggttgtctggcatcagctttcctgccctaccagtgtgcttccccagaagaacccagaaatgtctacacaattcaccccttgcagtttcaagtctctgctgggtatccagactaggttcaaaacttcaaccagtaacttttggctttcagagcagaagcactaacctgccctgacaatgacattgcagaaagttttcaaaccacaaggttgattatacgatttcctttaagggtgtagttttcactctttacatttctgattagatatttttagaacaggattaatctgtggcatttgtagctagttctaaaaattgttcataatttcacttgcaagacatagaacctggaagacctactttggttataactgtctcagcctgctaaacactcccactatcccattaaggaagcactcaagccccaaggatggcttccaaacagagagtggatcaccaatttaatctctcagaatcctatagagccaattcttttttgtcttgtttttgttttttgactttatgatttttttgagacagggtttctctgtgtaacagtcctagctgtcctggaattcaatctgtagaccagactggccttgaactcacagagatccatctgcctctgcctctgcctctctgagtgccaggattaaaggcatgcaccaacactgcccggtgagcccattcttaatatgatctagggtcatgtgggtttctatgactgaaggtcagggtcattcctgaccttctgatccgaatgccctggagaatggtggcatgcctgcccaactcagcaccaggaatttcaagtgttgtaactcagctgagagcaaaacagaaaaaacttgaagtactctagtggcatctttccttgtcagtgaacttgtagtagtggtcacacactttagacgtggtttcaggtgcagacttgactctttttttccctttttaaaatttaaattagaaacaatcttattttatatatcaatctcagttacctctccctcccattctcccatgcccccaactgacccctatcccatccctcttatgctccatagaaagggtaacaccttctattggggatcaccaaaaaaatctgtcacatcatttggggcagggcctaggccctcccccatgtgtctagactgagagagtatccctctattgggaatgagctgtcagtgtccatttgtacactaggtgtaaatgctgttttattaccaggggccccaaagactgtccaggcctcctgactcccatgtgcaggggcctggttctgtcctacactggtttcccagatgtcagtcttgggtccatgagctcccccttgtttagatgagatttctgtgggtttccctagcatggtgttgacccctttgctcatcattcctccctgtctacaaatgcattccaggaaatctactcagtgcttagctgtggatctctgcttctgtttccatcagctactggatgaaggctccatgaaggcatatatggtagccatcaatcttattatagggagaaggcatttaaggtagcctctcccctattgcttagatttttagttggtgtcatcccagtatatctctggacatttccctagtgccagatttctctttttaacctataatggctccctctattaaggtatctcttttcttgctctcctctattcttccccggctcaatcttcctggtccctcatgtcttcctcccagatttgactctttcaaggtgtgcactctcctgggtctcagagggcatgggaagggcagagactgcatcttctggagcaggaaagcttcagcagttatttattcttatctgtgtaagttcttccccaataaaacacctatttatcatttatcttgggtctggtgaactcatttaaaccctgactccaaagtaccccttgagtagtcacatggttcctgttttttagaactacaaaccccaatgtttgagaatgccaggttctttctccccgaaggagaggaaaagttatgttgcagccaggctgtggtcacctgatgtcccttgggtgtagttttctgagatactgtcatttgtggttggtataccacaaaccatcgaagcttcctgtaggtgcttccggatgtggtggtgttggattaagtcatagttacagtctgcacactgcagttagtgcagcacaaggtgatctgcgttcaccatgggccacaatctcttcttcttggtaagcagatctgggctctgtgtcaggtgggaaagccaagaaagcccccatgtgactgagttcattatttaggggttcacagtaggatggaaggcatgagttggggtctgggagtggagaactttttcctatgatgaacccttgctagtgaacggtcagcatttctgtaaatgccatttagtggcgggatgatttgaaatgcctcattttaaggccaactgttcagggtaccatatccttccttgtgtattttgagaactgtgtctttaattttcaatgtaaaatgctatattaaagtcttaagatgcatagatagacctcactgtgtagtcatgttggcctctgcagtgttcctctagtgaaacctgcttcttccttccccacactcagcttgtggcttttcatggagcttccctctctgaagtaagaaatgctttcctaaatctgatgtttctttccgccatcaggacatttctccctctgggttcagacttctttggttctcctccaaccccaggtgctggggatctgccaccattgtggtcaccacaggagtgttagtagctgcatctctctggctgggctgggtgagtagctttttaagcttttcttaacatctttggtgagaagaaggaaaagaacaggagcatgctggggacaaattgagtaatgatggtgaagactatgtggggtgggaaatctgacctatcttgatgaatacccaagcagtttgtcatatcataaagagttataaatgagtcctgaagcaggtattgtttatgctttgcaacactggaatttcttcttcacttacagacaagaatgagggacctgagattatcccatggtcaggaactactggggctccaagaggatgatccatgccaagggcacggcagccctcctgatgaacacagagattaagtcatccccacaggttccctagcatctctggacaacagtgtcagaggctactaactgctgggatcaaacaggggtgcagtgattgaaagcaagaccatgggtagaccagatggccttcacacacttaaggctcagatgtaggaaacaggttgtttgttttatttattttttgtggagtgtgggagggctcaaaacagggcttctctgtgtagcactggctgtgctggaactccctgtgtagaccaggatgttcttgaactcacagaatgacctgtctgtacctcttgagtgctgggattaaaaatatgtgtcaccatggctggctaggaaacactcattttatcatagtcattgtccaatactacatgttcagagaatactgaataaattccgatttcatgtgaagcagctggcatttctgttctttgggagttggactctaagagagaatagaaaggatgtaaaaggaagggctggaggggaggtaacagccagcagggtggagagaagcatggggggggggagagcagagcagggtagaagcagagcagggtggttgcaggggaatggaacgtcaggggaggccatggcatctctatattgtgatggagcagtgcccaacaaggcataccccaagtcaaaaaaactcagtgcataaaggctctggtcactaaccctgaagatgtgagtcctgaaatgcttccccaaagctgccctctgagcttacatgagccatggcacccctccatgcaaataaattagtaaatataaaattaaaaaaattatttgaactttgatgttctgtgcggtctccctgattttctccaaagggcagatggttactttattcagctctattccacttttacagagtcactagaatttttacatggtgtggtgaatgcctttttatttgcccaatgtgtaccaggctctggattctatatcctcagggtgggggggggtcaagacaatttgtagtcagctgtgtatctcaatatttagagctggggagggttaatggtatgagagcaagcacacatttagccatttgtctttcatagcacttttgggtggtgggtaccaattgtgtggctctccctcagtatgacggaggccctgcttgtgccaacagcttcactttaagacaggaagacaatgaactgatttttgccccagttctccattcaagtggaatcaacaacaattaaataaatagtactactcaaaagaaagaaagaaagaaagaaagaaagaaagaaagaaagaaagaaaatcaagtgaactttgctcaactgcctcgtactcactgacctccatttcttcaccaggagaaatcacttcattcaggaaatgtagatcaatatagggaaaagtctgccttgggaacccttagtcagagcttcagagactgagacagattaataaaaataatatcgatgggcgatggtgcatgccttcaatccccagcacttgggaggcagaggcaggtagatctcagtgcctggtccacaaagctacacacacacacacacacacacacacacacacacacacacacacacagcccatcttgggtttgatccttgaatacaaccccccacccccacccaaatcaacaaacaaaacaaaacaaaaaacttgtcactctatctgcctggcatatttgtccccttcttctgtcactgtggcgcccaccccaagtgctttatttctatcacatctccttttccaatattcaataagtctgttgtgtttggtgtggctcagctggtagagtgcaggatggccaggagttcagggtcatcctaggctataaaacaaattaagtgggagccagaagcagaagcagcaaacctttgtgtttttccttttcctaccctgacaattccagtttctactttctcttcctgctttgctatccaggataaaaagttaggttcaggtggcagcttccctcctctatctttcccggtgcccctctccctccctcctgctatatccaccaagttcctggaacaggatgctccaagcttccagggcattgctggagcagcagagaccttgtctgaagcactaccaccagtgttgacaacagaaccagctgctttgtaaggagatggacttggtgaaaacacttgcggagtgctgagttttaaggaaaaaacaaaaacctaaaaaactaaagcatttcttggttctctgtgctggcagtcagggaggggtctgtgctccttcccgggatatgatgtttatcttgttgacacaaactctctctctctctctctctctctctctctctctctctctgttcccaaatatgagagagattggcatgattcatatagcggggtgggggttagttacccttccattctaccttctgacctgtttccagataggtgggaaagtgattcaaaccagctcaggggagtcagagtcagaacagggcaaccactgtccactgtggcatcacagaggaggctgcttgcagccacaaaacttgcaagtaacttagccacaacaccacaacacaggcaagttagtttcaggcaccagagtaagcactgtcccaccacagagggtgcagggtcgctgcagtcacaaaacttgcaagtaactgtgccacaacacaaaacacagtccaggcagttccaggcaccatagcgaccactgtcctgccacagagggggcggggccgctggaggcacaaattttgcaaataactgacccacaacacaaaacaaaagccccatcaagatactgactctagagtttaaagcttacctagtattggtaaagtctaaatggtcttgatccagttcattgtctctgccagttaaatacttaaaagtcaggaaaactctccgccactggtagcagcaaagaaatctcaaacaccgcaggcagaatcagccgttgaagaagcacgcacatgtggacctgaggtgaagcctataatagccaagacacaagggtagacagtgaaattctgtggtgtatcagggaggtctgggagtcttgtctccacaaactggannnnnnnnnnnnnnnnnnnngctcttccaatcctctggcagtactagcatcccagggttagctcctcccaggacccccgaccctccttcccggaccccgggcgggtgcgaagccgggaggggagcagggcgcgaggctcaggagggtggggaaggggcgagagggtctgactgggcgatgccgggacgcggcttccccggtgccgcccccgcccctgccctcctctcagaggccttttccctcccgacccggcactcacgtgcaggccttggtctgagctagggtgactgccagcagcagcagaaccatgggcggcgccattgcccccatctcaggtctgggagcttcagagtccactgccagcttggactttgtaactggtgcccgtggagacgctggttggttctctgggatcttggcgcccaatgggggtgaggacctcagagtggtcatcattattaaggcagaaaggacccaacacacctcgggtgctggagaattaaactgggagtgggagggggcggggtatggggataccctagccctgggcttccccactgaaaatcttacctgctaagactttgcctgacactgtgctgcaggagggagcaatgtttgtcatggaatgtctgagctgcctaaggccaactgctagtcaggttagtcaggatgtgggcagaggagatcaggttcactcagaagtgtgcatagaagatctgaaccactcaggaatgtgaagaggagatcaggaccactcaggagtgcgcagagcaactcaataacaactcagcagtggctccaacccactcagtggcctgatcagtgggagctgagagtataattctaattataaacattcatctgggcattgggatatttcagagtcagagtcagaactcttaatggtctaaccatgtttcctgattaagggctcagtggtcttcctcagcagatgtcctccagtggtgatgggatcctgtcctgtgtggagactacagggtgctctccaggttcagacctaaagactcatggcctccttcctgggttgctgtgtctcccaacagttcccgtggaaaccagagtttagataaaactagaagcggcacaaaatacccagggcacacaccagtgttaagagggcgacagcagggaggccatcaacaccagcaggtttgtggcatcttgaggccaaggcatggtctgtgtagctgcatcacacccgatgctcattctctgtccacagggtctccatgggctccagcatcttctccatcacacagcagggaatgaatgacaaaggatggctgctcctccaaccccagactcagtcaccttctgtagtcattgctggcagatgtttgtttcagggtccactgatctcaggcagccttcaaactcactatgtccctgagactggctttgaactcatgacatctggcctccacctctgcagttctggggtcagaggcatgcacctctatgctcagctatgcagacaccacaaaccatgtgtatcagggcactttggtcatttcatcctgtttctccctttcctgcctctcctgctgtccctcccccaagtggtccccttgctcttcctgtctcacatgtttaaatcctggtccacatatgaataaacatgtgtaaagccacacattgtttcaatatggttgtccccttctctcctgggaaagagactcccagtgagagcctgtgactgaatccagtagagcagtgagccctgtctacactgcttgtgttatgtacacacactcctatgacagagttaataaatccactacagtaagagacgagtaccaattataaagcagaatgatgacagcagggcagtgtagagaagtgattaatttgtccccactgtcctgccctcacccttgtgatgtgtggtgacagatgagctgatgagatgagggagatgagtgacccaggctgtgtgtcagtgactctgtggatctgatacctgagtggaacccggagaacctcagccttgtgcagtgtggacagtgaggacactggacagaggacagttctcacaccagcggagacagactggggacagaagcttcatccatagtcagaaagaaaccatataaaacatgtatgtcatttattcctgcaaagttttgccttgtttctttcagatctcagttaaccaaagtcactaaactgtagacatataaaccctctgataagagacagctaacacaccaagagtctcagggcagcatggcatgtttctgcaagctttaagatgaggaggaggaactttagtcccctcaccctgcagggatccccagctgtctactgccctcaccaggactcaggcactacctgttcccatgaactgttcacacaaagctctgtgcacagtttactgggatacttggcagtgtgacctttaggctgctccacagatgtgtcaaataacaaggggaaggatgtcctgctaggctctgtagatgtgtctataaaatccatggacctgggcagaacatgttggtgctttcttaaatcccagcactcaggaggcagaggcaggtggatctctgaaggtccatggtgagctggatctacaaagagattcagacagccatggctacatagagagaccctgtcatagtaaagcaatcaatcagtgaatcaatcaatcaatcaatatatcaatatatcaatcaatgcaggcaccaatttacttaattctgggaattttataagtccaaatgtcctgaggcagaaatcattatccctttcagccctgtgcccagcctgtcccaagctctaggagtgaagaacccataacacagtccccaaggccaacctaggagaaatgcagatctgcacagtacagggggaacctggaccctgtgctgggaccaagccacctcctcctgccccccatgtctcctgtgcctggctcacctcactgacaccaagattgccacctgcagtgacgatggcacagatgacagaatgtgattatctctgacagtgcctgattgtagtacatgttctaataagtcttaataataaaaacccagaggcagatattagtggatgaaagttgaaagaccagagaagcaaaaacatgcagccactacctcttacctctacaaatgggcgatcctgtctccatgaatcctcagactgaatgctctatctacaaaacctcacactgcaccctcacactgcaccctcacactgaatcctcagactgcctgtctctttgctccttatattctgctctctgcctgaccgtatccctgtcttctctctagagctgaaattaaaggcatgtcatcccaagtgctgggatcacctttgtgtgagctctgttgctcttttagacagtttcaatctcttgaagcccagggtggccttgaactcacacagatatgtctgcctacgtctcctgaatgccgggattaaaggtgtgtgcccccactgcctggcctctatggctaactagtgcttagctctgcaatctgatcttcagatgagctttatttgttaggtcataaacaaagtatcactacaccctatggtgtaatcttctactgtctctgtcaatccataaacaggctgaggactttactcggtactttctgaatcacaggatggatctatggttggttccatggatctgtcacacttgggccaacatcagcctcctcctgcaatgcctgcagttgagtctctttcctccattggttcctgtcagctgcagttgctccctctactgctaacccagagctctggaaggaatttgatagtagcagggttcacctgggctacagggttagaaatgaagcagagactgtctcagactgctgacccactgtgtgcaaagctcacagctgctgaacaagggatgagaactaagcttgaaggtgctcacccacctcacccacagcccttaatcctggttgacccacccaggactttcactttgatctgtacagagtcatgcagtctgtaaccttcacccccccagtcacctcgggacctgctgactctgagaagatctggtgttttgggctcctccctggccacatctgcagggctcagtttctgtgtctttactgcatccacagtggcaccagtcatcccagaaggatagtggagggaagaaaaggaatttgaagtcagagcaggagggaagctaaggttgccttgaaggcttggtgaatgagtgatgccaaccacagattctggggagtcccatctgcaccctaaaatctatatttccccactgaggctcttctcttttgggtactctctatgccagataagaaagcctgtgtccaacactccagtgggacaagaattctttggggtgacaggagtagggacctggagatggccaactgggaagtcccccaaggaggggagacaccaggagggcagagcttgacttagcggggggtctttcttctcttagctcagtcccacactgtgacctgacctaatgaaaacagtccctctgaggttgggagtgggacaggtcactctgagtttgtactgaagagctgtgtctgaattctgggggagggagggtgttgaccatgctgagactctccggccgtcagtggtttgggatcctgcccttctttccagggtttattttaagtgtcccattctctaggagtattattttgttttggttgagacagagtcttactctgtagttctggctgtcctagaatctgctttgtagaccaagttggactagaactcacaaaggtccacttgcctcttcctcctgagtgctggtattaaaggcgtgtatcacccacggccagccatgactgttgtgctgtaactaaaaggcctttccaagggcaggaggagccaactatgtacaagtcagaagctcatctggctctccatagctttcctttgtctgtgtcaaatggacttagatgctccttagacattctaagggccttgttctgaggtgacatctttatcctaggggaagctgtgagaggattcctttggggagaattctgatgagggctaaagccattactgcacacctttaatcccagaactcagcgggcagaggcaggcaggttcctgtaagtttgaggccagcctcgtctacatagtgagttccagtccagcctggcctacacagtgagatcctgtctcaaaaagagaagaaatcattaaaccatccaatgcctctctcagttacacttgaccccaacctcttggaccctcatatcctgggtgcttcatcagttctcaaagactatgactctgatgtcaccccccactgtcttctccagcacaaagtgtccccctttgtccctctgtctgagaacccatccaccctgattctctagtgggcatctcagctcagcattccctaccgaggcttccacgaccctcctcatgcatccctgacagtcctcctcttcttcacctatggccactctgtcttcctccaggacagtctgcagtgctgcctgctgctccagcccctccctgtcacacccacagttagtccaggaggaagggctgtgatgtcctctgcagagaggacccaggatgcctcacttcccgtccccctgacttcacaggggaagacactggagtgtgcttcaggagcaggacactgctttccccaggtccccactgtctgccccgctcctcccctgctacagttccctccagcagatcctgatggaagagaaattgtgcctctgttccctctgctcaactgctctaactcctgtcacactgtgaggacaggtctgtgttgtgtgacagactttccctggaaagacacacacacacacacacacacacacacacacacacacacacacacacgtccattcatctcagttaggggactcacagctgataaagtaaccattgcatcagtgcgcagcctggtgagccagtgagttttattggggtcaccaacaggagtgtgggagaggggtaactcacaggggcaggaacaactgacagcccacagacagcatgactgaaaagcccaccccgacacgggtaacaactcatggaacttcctccctggagcttctgcacagcttccaggcagctaaaaggtcagagaattctctcacagctggatggtcagtgtgctcccccaggacatgttgctccttgtcatacatcagcagtggaatcctagagagttgtcagagtttgtaaaataagatgagaagaccccatggagcttctattcccagaaactatttggtggctccatctatagtgggagctgatgccctcttctggcaagaagtcaatagatcactcaaatacataacaaataagtaaataaatcttaaaaaaaaaagattatgatgctgggcgttggtggcacacgcctttaatcccagcccttgggaggcagaggcaggcagatctctgtgagttcaaggccagcctgagcacactaacacttcattgtctgttaaaccagcagtgactttctctgaaagagatgctaggcaagacaatcctgatgttcctcagggcccaccaatagttgcctctagacccatcaccagactgcaggcaaagcaggcccatggaggggaggaaagtgtagtcaggctgtgaggaagggcgccacactactaaagagcttaataattttgctaattcattcaagaagaagtctgaagtatatgtctgggaatggattttaagtgtgtggaataatggtggaaggaacattaaaactgggtcagattaacacttttgatatgggtcctctagatttaatatggaagatctcacagtttaaaaaagagtcaaaggaaacttaaaagaataaataaattatatatgaaaaagtttgaatgattggcagaagtacttgtcaaagatggctcattgatatgacattggagatgcctgatatcccgtggctgggtgttgatgaaaggatttgaaatctcagggaagttgcaatgctggagtgtaagatgctgtgtaaaacccaatcctccacagttgggaggccagaagacactctcttcactgattctataagacacaaatggtgaagggggcaccggcatgtttgaagagttttgttgtcgcccttttccttgacctgacctcagggttggacactgttgctcagttgggttaattaaaggcaatgggtttaattgggtcccaaggtatcaggcaccaaatggcagcaagggattgctaaaggcaaggtgatcatagttattgtagcagtcatcacaggcaaagttaattttttggtggcatgaatcacatggacctttggtagaggactaaccatggtgattccaggcatgaaataaatacaaagctgtattagctagtgttctattgctgtgaagagacaccatgcccatggcaaatgttataaaagaaagcatttaattggaacttgcttgcagtttcagagggttagtccattatcatcataatggagagcatggtaacatgcagccagacatggtgctggggaattgctgggagttctacatctggatcattaagtagcaggaagattaagaaccactagaaccaaagcctgttctggagagatggctcagcagtcaagagcactggctgctcttccagaggttctgagttcaattcctaacacccacatggtagctcacaaccatccttaatgagatgtagtgttccattctgacctgtaggcatacatgcaggtagaacactgtgtatataataaacaaataaaccttaaaaaaaaaaaacaaagctgaacaccagtgactcatatcctcagacaaggccacacccactccaataaggccacacctcctagtctctctcaaacagtgccattctctgatgaccaagcattcacatatatgagcctatggcgtcatctttattcaaaccaccacattccacttttggctcccataggttcctatcaatatcataatgcaaaatgcattcagtccaaaaagtccccagagtccatcacagactcaacactgtctaaaagtccaaagttcaaagtctcttctgagactcctggcaatgtgtgagctgtaatcccagtaaaatcaaaataaaagagtaaagcacaaaattctaacctacattggcccctgatacacgttactgttccaaaggggagaaaagtgagcacagtgagcaaatactggaccaaagcaagaccacaatccagctgggcaaactccaacctggctctccatgtatgatgtcaaagcagtcttcaatcttcaactccttttagctctgttgactgctacacgtttctctcttgggctgggtccatagagttttagcacctgtctttgagaggcgtcccaggactatgtcatcccttcataaaatggcctctctgggcctccatgcagggacaaccctgacacacacagctgacctctgctgcttccctcagccacagagagagattccacaacccatggacaccttctgccatggaaaggacaacactttgttcttcctggagcagatacttattctggttatggatttgcctttcctgcacccaatgcttctgccaaaaccaccatctgtggacttacagaatgcctcgagcactgccttgttattccacacagcattgcttctggccaaggaactcacttcacaccacagaagtggaacagtagcccatgatcacagaattaattagtttcaccaagtccctcaccatcctgaagcagctggcctgacagaaagatggaatggcctcttgaagacacagttacagagtcagttaagtgacagcagcctggacagctgaggtggggttctctagaatgtggtatatgctttgaatccatgtccaatatatggtacagtttctcccatagccaggatccatgagtccaggaatcatggatggaaaagggaacagctccactcactatcaccttagtgactccctaggacaacttttgcttcctgttcctgcatcttaagttctgctggcctagaagttttggttttagagtgaggagagctcctgccaggatccacaacacacattccactgaactggaagctcagactacccattggccaatttgggtttctgaagtcctttagtcaacagtcaacgaaaggaataatagtgcaagaaggcgcgattggtccatgttgctaaaggaaaatttgtttgcttctccacaatgaccataagaaagattatgttggggctggagagatggctcagaggttaagagcactgactgttcttccagaggtcctgagttcaattcccagcaaccacatggtggctcacaaccattcattatgagatctggtgccctctgctggcatgcaggcagaaggctacataaataaataaataaataaataaataaataaaatcttaaaaaaaaaagagattatgttgggatgaggtgcttttggatgtgcgctgggttgtactgctgccgggaaactctgcatggtcctgctagcagcggaactaataccttcaggcactatgtagcatcggccacaggctgaacagcctttccgctcaccacatgccacaaccagacacttgtttctacctgtgtaacttatagatatgaggagtttggttcgggctcagctgtgccaggccccacacaatgcagtcacgctagagggtctcagttggccggattccccgataggctaattacatctgtcctgacgaagaagtaagtcccttattaatgaaaataacatggagacgaatccaaaaaaaaaaaaaaagaaagattatgttgccaggcagtggtgcacccctttagtcctagcactaaggaggcaggtgaatctctgagtttgagaccagcctgatctaaagcatgagctcctgcacagctagggctacacagagaaaccctgtctcaaaaaacaaacaaaatgtgttagtgttccattgctgtgaagagacaccatgaccatggcaactattataaaggaaagcatttatatagtggcatcttgacttgccaatgaacttgtggtggtggccataccatttgggcgtggtttcaggtacagacatgacccattataaggtagaggaggggctgggtcgggctctcttgggttgcagagaacatcagaagggcagagactgcatcttttggagcaggagagcagaggtggttatttattctttctgtgtaagtgcttccctaataaacacctaataatcattcatcttgggtctggtggactcatttaagtcccaccttcacatttaattgggctggcttacactttcagaggtttattcctctgtcatcatggcaggcagacatggtcccagagaaagaggtattaatctgtgtgtttctacatggccttatcttaccagagaacgcccctcgtgtcctatgttcccagtagctctagcccacaggaccttgaggcaaggactccatcccctcctcacacctcagaggaacagaaagccaagcatctgccatatttcatagcatctatcccaggtgaaatccagccgttccccaccagactgtcttttaccagtaaacaggttagccagactctgcctgcttcccgtcaggcttcctctgaaatgtgtcctctctgggggacccatctgctctgcagattctgacgtgagactgtttgtttcctcatagggagagtcctcctgtaatagattttctgtaatgtgataatagttttctccgatgatgcagtaagccagatcaagccgaaatgaaaaattaaaagagcaggtatatttgaggaaagcaactccctggtgagttctgcaatcccagagatggaggcaggagaagtcacaggcctgaactaagtcacagagcttgtagagcttgtaggcaaggggtgaaggtgtgtccaccacaagctgggtttatgtcaaagtatggtcaaaagctgagcactgtcttaaacaggtttctgcttctggcagagtaccagttgctgactacaggctgtttctagtagattgtgaaccctggacttgctgtggatgtgaaccaggccagctgatatggacatcccctgtctctgcaacagaatctgccaaccagaagctcctgaaggaatccccattgcctaaattcccatttttgcttttgactagcatttcagccttcttgggtccctgactccgtcnnnnnnnnnnnnnnnnnnnnnnnnnnnnnnnnnnnnngcaggaagtagcatggaaatgaatattttccctggttgaaatgctaagtcagaaggaactcccttgcatgggggaaatgccaatatgtctcactccctgatggggacaatggagagacagcaattccatgattgaaatttcaaaaaaaaaaatatgagggaatgaagggaacagctccccatttcggcagccataacagctgaacacgtgtggagtcaaaagcttgatgcaaactgcacgaggctttattatagttgtttaatgagctaagcccatattagctcgggcctttcgtccacccgccatggcagatggctagaaaagacatcttgaagtgtctgcatagagatcttatagggcagcgtaaggggagtgtctaggggtacacacaggctcaggattggtgtgcctccaggcttggaggccttgccctgtgttgattggttaacaggttgttatggcccataggccctccagggtggttgctatgctctgtgcgtcattgctgtgcacttgtccgtaaagcatacccagagctgtaaagcatagcaccgacagctaacctctgattggttccttgccatgagacaggcatctgacctcctagtgactaaggcaaggtcagacaagcacgtgttcggctgttatggctgctgaaatggggagatgatcccttcagtgggagaagagaagagcagagcagagaaaagagtagagagagagtaaagagagagcagagagggcataaatggtcagggattaaaggggtcctctgcacgtgtgtgcagacttagttcccatggaaccctgggctgacctgggtactgcctgttccaccaggtaacagggacaggccagcataatgcctgaacctttcaatcccacctttacttattattttaaaaaaaggtggggtgttagccatggcagattaaggaataagggtgtcgaattctcaagactgcttcctgatgacatggggggcattgaccatctttgggagaactgagaaggttggtgtgctgccacgtcctggggtagctggttgtttcattgcagaacgtgctgtacggaactccctggcacctcttagacctggcaagatgttggcagcagaggacaaagttaagtttagaaaaaaatttttttcttaggtcctgtcacttgaggggaagattagattttaagatgagggaatggttcccaaggggttccaaatgagggaagggagtcctgggaccagggaaagattgaataactggagtgaatctgacctgtttagatccaattcggctccctggaacttacaagaatccttagactttgtggaaacataagtattagacacattagcagcatattcacattagaagcaacttggctgaaagtattaccattttaaaattgacagatattttttggacaatgaaaagcatcttagtcttgaccttgtagttataatcatatagtggtactgtagaactttgttatgaacactagcatgagaaatagagaaatccagagcatacttcattttttttaatgtctcaacttactttatcatcacttatgcctttttaccctcagaccttcataactttaattcatacaccttacattaccatcttagaccttccattctcagacctttataccttccattctcagacctttataccttccattctcagaccttcataacttgcatttatccaccgtgttagacctttccatcctcggacctttgtaactacattctcagacctttatatatctttcactttcctatcttaacatagataaaacccaaaatacttgttcctgaaatctgttttgctttaagctggcaagactaccagtcgtcaaaagcatcagagttcttgagaaggataagattttacagaatcaatgattaaagaataacaaagacttgccagaaggctgcatggacagccatccccaaggtcctccatccatagtagcgggctgcaggacacctgccttcttgctgatagcatgtgacctgtggattactgactacacgaagactcgcctaccattgacccaagagacgcagggtaagtatacaggtacagagacaagcaagactggataagaataaaagggggaacaagaatgttatctctgatctgtacattgtagaaaacagacaggagatttaaagggacagagtagacttaaacagagggccnnnnnnnnnnccggggaaagacacagtattctgaaaaaaagccatgagcaacagaaccagtgaaagaagaaatcacagacaaaaataaataaataaataaataaataaataaataaataaatagcaaaaaaataatctgacagaaagcaaaagtctggctgccaggtttgctggcacaggccgctggagtgggtgtgcctacaagtatgtcacatgaccaacatggcgggcccccaggttagcccacatggtcaagatggcagcccccaggtcagaccatatggccaagatggtggcgaccataagccgattttttgtctatttacctgcttgttggctgcaactagaaagtttccttatgcatttcccatgggtgaggcaagtggaaaaacctgcaaaagctcctctcccgatgcccgtcggcccgtgggagttgccaggggcctggccccaaaggggccacagctgtccctgaaattgataaaggaaccaaaaaacaccgctcccagagcagggtgctagacttgacctatgggagatacacccaacaagtgaaagaagaaacaaaaaatctggcatcagtgcttcactgaactgagtgggaaggcctaagctaggtcacgtggccaggatggcatcccccccaggtcagaccaaatgtccaaggtggcggcccctgtaagcacattctcaactgccggaagaaattttctccatgagtgaggcagtgtgaaaaagtgaaaacaaacgaacaaaaaaacctctcagagcgtctcaagcagacactgccaaccaagaagaaacagggtcagagaacagaagattagggacattcccaggtgaaagtaagttcccactgggaggcagaagaactatgctcatttatctactccctggcagtaaccgaaagttctcgtaaaatgtatttcctgtgggcaaggccaaaaatgctctctatctgagagcacccagcagaaagcccgaaagaggtcagcagtctgaaaccgaaaaatggacccagtagaccaaaaggcagtgaactccaaaatggagtgcttggtctgccccatgggaaaagtaagggagtatcttaccggattgcagccaacaggcagatgagtgagttcagagatccttagtttgaaaagctctttctctgtttgtcaaggttcacctccaacctacttctgaggacttaaatttcttaaaatctatcactgcctcttgtaaaacctgtcagatgtcaaaccctaactccaaatatcataatgaagggacctgctccccatttcggcatccataacagctgaacctgtgcttgtctgaccttgccttggctaataagaggtcaggtgcctgccttgtggtaaggaaccaatcagaagttagctgatggtgctatgctttacggctctgggtgtgctttacaaacaagtgcacagcaatgacgtgcagagcatagcaaccacccacccctagacactccccttacactgtcctacaagatctctatgcagccgctttgagctgtctttcctagccatccgccatgacgggtgggtgaaagacccaagctaacatggggttagctcgttaaacaacaataaagcctcttgctgtttgcatcaagcttttgattccacatggtgattggggtggccgaggtcctgggctgagatcctggaagcctgagctttccgggggtcttacagtaactccccttttcccacccaccaggctaggggctctctcccagggactgactggcaacttgactttacccacatgcccacagtcaggcgagttaaatacctcctgcactagtggatactttctcagggtgggtagaggtgtttcctactactaacaagaaagctcagaccgtctctgacatccttctcagggaaattattccccggtttgggattccagcctctcttcagtcagacaatggtcctgggtttagccctcagatctctcaaaccctgtctaaagctctcaatattccttggcattttcatattccataccacccccagtcctcagggaaggtggagagaactaaccattctttaaagactgttctggttaaaatgtcacaggaacttcaccttgactgggtaaagcttctgcctctggcccttttcaggcttagggctctctctaaacaactgcttttcatctcaccctttgaactcatgtatgggcagctggctctaacacctggcctctcatctaaactctcaccgctccctgaccacctgtttacacctttacttcatcatctctgccccctcctatgggaatttgctgactctctacctcatccatgtgctatcccctatacctccccaattaatatcagggatcaagtacttctttctcttccagaccagggcccctccctctgtctcctaaatggaagggccccttcaaagtaattcttgtcactccaacagcagctaagcttgagggccttccccactggattcacttatcccacctcaagccctttacttctccacctgagactcacccttcatacacagtttctacaacaggaccctgttcccttaggtttcagaggacactgaaatcatctactttgcctcctatttcagaagaataaggctcaannnnnnnnnnnnnnnnnnnnnnnnnnnnnnnnnnnnnnnnnnnnnnnnnnnnnnnnnnnnnnnnnnnnnnnnnnnnnnnnnnnnnnnnnnnnnnnnnnnnnnnnnnnnnnnnnnnnnnnnnnnnnnnnnnnnnnnnnnnnnnnnnnnnnnnnnnnnnnnnnnnnnnnnnnnnnnnnnnnnnnnnnnnnnnnnnnnnnnnnnnnnnnnnnnnnnnnnnnnnnnnnnnnnnnnnctagatataatctaatgtgtctaatctttatgttttcacaaactttaaggattctcataatttccagggagcagaatcagatccaaacaagtcagattcactccaggtaatattcaacctttccccggtcccaaattcccttccctcatcttgggacacctcgccatgcagaggagctaaaaactctttcaatgagccgtgtccagtggtgttaccaccccccctttttttttactggaatgcaatgacacacagaacaaggaatgtgaatggggagcaacccaaacattgaccttccagggcatttgagggaaggatttagagggctcccacctggttccgccctggtaatagacaagcttgcttgtatttctgtcttacctggcacagggagatggtagcatcatcttgagatttcttcgtccctatttccctaacctgccatgcccaattctccaacttttataataaacaacagccgggattgtaagaacaatacacctggacgaccccacccccctaacgacaggtggggcacgcacaggaaaacttgctaagtcatcgccacgtcacctgccatgcattgcagcctgcgtgaggactctgcgcatgtgtgaaaccccagtgcgcatgtgcaaccttccctttaaaaggtccagccttccatttttctctctctttggctcctctggggttggctgacaacccagctccatctcccgcccccccagcccccccattgttcctttctttacatcagcagctgcaactcaaaaagaataacactcagcagttatgaacacttgttgatcttgcagtggaccaggtctctggtgtcaatacccacattaaatgactcacaattgcttataactccagttttggggtttctgataccttcttctgacctccttgggcatatgtgcttacatggttcacattcacacaagcaggcacacacatgcacacataaatataataaataaatctttttattttttgaaataggatatatttgtatagctttgtaaaccatgctggcctcgaactcacatagatccacctgcctctgcctcccaagtgctaggactaaaggcgtgtgccaccaccagcaaccacatggtggctcacaaccatctgtaatgaaatgtggtgccctcttctggcatgcaggcatatatgcaggcagaacactgtatgcataataaataaataaatctttaaaattaaaaaaaaaagcagtataaccatttcttcagtatgatggcatttccagtgaggactagatcatgaaggctctgacttaatggacattaaccccttggtggattcataataagacagcattactgagagttagaggatggtaggaaatggaagttactggaagatacattttgccctggtctcttcctatacctttccggccaccaagatgccacttttctctgccaggacaaattaaaatctttccaatcttgagacagaataagcccatccgacctcaggaattgtgccacaatgacaggaaaagtaagaaattcagtatttctgagcctgggtatgttttaagggcatttttgaagaatccattattctgtctccccacccatcattttgtttgggtttttgttttttcttttgttttttgtttttcgagacagggtttctctgtggctttggagcctatcctggaactcactctgtagatcagagagatctgcctgcctctgcgccccccccccccagtgctgggattaaaggtgtgcgccaccaacacccagtgtttcattttgttttgtacattctctgtgtgttgtgtggatgcacatacccatgtgtgcataagctggaggaaactggagggtgatgcttgctgtcactcctcaggtgctgctacccacatttgtgggtttttttgttttgttttcttttgtttttgttttcttaaaaaaaaacggggtctcttactggtcccaaatttgttaagtaggcaagtgagatccagtgagatccagggacacagctatggggaatctacccttgctctgccaccccagtgctaggactccacgtgcatatggtcgaatctgactttttacttatctattatttatttatttgcacgaatcctgggaacaacacaggtccccgtgattatgagtcaagtgctttactgacagagctgtctccccacccatcatgttgagtgtttgatatttgcattgtaatttgcaatagtgggtcaggaaattatcttgagggtgagacagcaagcaaatgtaaacacatacgaatacagctttattaattgtagacatgcagatgcagatgtgccggaggcactgatgcattgtgggaacattaattcagatttccaacacgcaggacttggctttttctccttacatgccctttacctttttaaaaatttagttaaaatataatcacataattatcccctttcctctcctcctccaactcttcctatgtccccctagcccctcccaaatagatggtctcttttcctgattattattatgattttattataaaattacttatgatgatgattattgttgtcacacacacacacacacacacatttaaacacaaatatataaatacaacctctggatgggtgttatggtgcaagcctttaatcccagcactccagaggcagaggcagaggcaggggcaggtggatctctgtgagtttgaaaccaacctggtctacaagagcaagttccaggacagtctccaaagccacagagaaaccctgtcttgaaaagccaataataaataaataaaataaataaataaataaaacttctggagtggagcccaggactgaccactttgtattggataatcattagcgggctcatccctggggaacctaaccctccctttctcaacagtttttatttgcttatagtgttagacccccgaaaactcaagtatccggggtcccaggccacgttcgcggtcaccccaatcaccaggcggattcgagagcttgctgcaaactgcacgaggctttattgtaatttaacgagctaaccccatgttagctcgggtctttcccccacccgccatggcggacagctagaaaagacggctcctaggggctcccaaaagatcttatagggctgcgtaaggggagtgtctaggggtatgcacaggctcacgattggtgtgcttggagagcttggagggcttgccctgtgttgattggtcaactggttgttatggcccataggccctcccagggtggttgctatgctctctacgtcattgctgtgtgcttgtccgtaaagcacacccagggtcgtaaagcctagcgccaccagctaacctctgattggctccttgtcacgagtcaggcatctgactttctagtgtctaggacaaggtcataaaagcacgtgtttggccgttatggctgccaaaagggaagctggtcccttcaccacatttcatatagaaatgaacactagtatgctaagggtcagaatcacagtccctttactaagcatgggactctcgagtttcctcccttccacactagtgtgtctgttggttttgtcattgctcaggtcttgtttaggcaaccacgttgttgacataccatggtgtaggttctctgtcatctcacaggtttcctggtcctttggagctacagtcttccttccctgactttcccagagttccctgagccttaagtgcaggagtgtgttccactggggccgggaaccccaaggtcagttctccttcaactctgtagcccaggctgtcctgagagatctgctgtctccacctccccagtgctgggattaaaggcatgtgccacaacacctggttttcgaattttttcattaatttattttttaaagatttatttattatgtatacattctgtctgcatgtatgcctgcaggtcagaagagggcaccagatctcattacagatgttgtgagccaccattgaactcaggacctctgatcaacctctccagccccttctgcctcccaagtgctgggattaaaggtgtgcaccaccactggccggctaacacctggtatttaaaaatcacttttcaagatgaataaatttaaggtttagacaatgggcagttttgtataaataccaaaagtattgttttttgtttgacttaattttttttttccgagacagggcttctctgtgtaacagtcctggctgtcctgcaactcactctgtagaccagacagactggcctggaactcacagagatctgcctgcttctgcctcctaaatgcttgggtcaaaggtatgtgccacaactgcctggctgcaatggactaattgtgttatcttttagttttgaaagggcacacatattaaattattgggtttctcagaggcacttgagaaagctatcatacaccaggaactattttgcatggttggtgcaggaaacccacttttgcacaccctaacctctatcttccagagaggtagaacttgttatgagataaagtcttgctgtggtcgaggctagtttcaaactcccaagctcaagggattctccagcctcagtctcttcaacaggtgcagtgcagatcactgtgccaggctagaccaaaggattgttttttgtatttgaagccctctttgataacaaccatggcctgagagtctttgctatagtccttggaatacaacccaatctgtttcccaggggaaccagaacacatgaacagaccacaaagatttatgggggaactatattcatgtgtgtgtgtgtgtctgtgcgcgcgtgtgtacgcgtgagcatatatgtgcaccatgtgtgtgcaggagcccaaagaggtcagaaggcatcaggtccccggaactgaaattatgggtaattgtgaactgccatgtggattctgggaaccaaacactggtcctctgcaaaatcacatgtgctcttaaccgtgaggtcaactctccagccctccagagtctattttccccttgtgaaacttgatcctaatggtctcctacacaggaggaaaccgcttgattgaaccatggatcaaaactcaggctttcctgctcctatacagggaaggcagctctgttgagtgcctgcttggcaagtgcatgagagcaggttcatcaccagcaccacataaaaaccaagtgatttgatggatgaatgtaattccagaactggaggtggatcagaagttcaaagtcatcagctcttacataggaagtttgtttgtttgtttgttttttggttttccgagacagggtttctctgtgcagctttggagccaatcctggcactcgctttgtatgccaccaagcccagccttagattttgaggtcttatacgctcagactatgccaagtttggcacacacacacagcctccttcttctgctgtcttcagatcaagatgtagaactctcagtgccttctccagcaccatgtctgcctcgatgcctccatatttctcaccaccaggagaatggactaaacctctgaaattaagcgggacccaatttcagagctttcctttataagagttgtcatggtcgtggggtctcttcatagaaatagatcccctgagataaggcatgttccattgtgtgcagtcaaagtgtgattgcgtgaatgtgagcacatgcacacacacacacttgtccataaattagatttagtatgcaagagccaaggaccatcagaaatgaattactggataagccaagaacataagctaaagatacagactccaggtatgaggtgtgcttttacaggtatctgtagacccagacaggcacaacctctagaaatgaactgccaaatatcattgttacctacacactacttagtactttttactgacttgtggactcagtgggaggctgactgagagacaaacacaaagcaaggttacagtagattgttacaaccatggtcccaggaaaccaataaacccagtgttctcgtcctggtcttgtctcttcctcaaggaatccggccttggagatgtgccttgctttggccaatgggacattaagttactgagtgttttggagcagttagggaattaactccttcaaaatcccaaatgtatcattgttgcgtatgggacattatgaaaaattttttaaaagatgcatcagtagttaagtgcgacacagggtaaaaggcaaaagggaagaaaacatcactcccaggatactgaattttgtttctatttctggggtaacatgatagtctgcagtcaccatagaagatatcacagaagacacgtaaatttagatctgccatgtttatcaccttttacattgttacttcaggcctgaaccattttccttatgactttataaaagacaactctgagatgaggaaagggccaagtatacccagaggacatgaacagtgtctgcctccgcatctcaacagtcaggaccacctctgtatggactctgctaagaaggtacaccgacatgtaagaaattctgaagcaagctgggcgttggtggcacacgactttaatcccagcagtctggagggagaggcagacagatctctgtgagttccatgccagcatggtctccagagtgagtgccaggataggctccaaaactacacagagaaaccctgtctcgaaaccccaccaaaaaggaaattaatttctgaagcatgatatccaaacacatcactgtgttgagaatgcaagggtggatgggcagagagccagagaccaggtggtttctcaagatggctgaggactggaaccacgttgacaccaagctatcccagcaggtcacagtaaggaagacctgttgtcactcttcaccctgcctcaccccaattaggctccatgtcttgtcactcccaatctgttgggggcctgatagtaagtggtgcagcattcttccggccagccgttgtttaaggagcttaccccatgttagctagggccttccatccatccaccatggcgaatggctggggaaaaattcagagaagccacaggatagagatcttatagggcagcataaggggattgtccaggggttctcacaggctcaggattggtgcgcctccaggcttggaggacttgccctgtattgattggtcaactcgttgttacggcccttgggtactcccagggtgattattatgctctgcatgtcattgctgtgcacttgtccataaagcacacccagagcggtaaagcatggcactaccagctaacttctgattggttccttgccacgaggcaggcatctgaccacctagtgaccaaggcaaggtcaggcaagcaggtattaggctgttatggctgcaaataaggtgcagaggacccctttaatagacagatccctgggctggagagatggctcagaggttaagaacactgactgttcttccagaggtcctgagttcaattcccagcaaccacatggtggctcacaaccatccgttatgagatatggtgccctcttctggtgtgcaatgagatatacatggaagcagaatgttgtatacataataaataaataaaatctttaaaaaaaaaaagacagatccctgcccatatatgctctctctacacttctctctatatactctatactctcctctgtgcttctgcttctcttctctctctccctggcgaacagccatggccggtagcccttaaccctgtttctcttctcctttagtctccctactctgctggacctgtaatatactggttaatatgtctaatatgtctcttagtcttatgtctcatctgccttttttcttatttatttttaacttaaacaaaagaataacacttctaacttgtgggcatgcaccctctaaacatgttaaacattttaagtcatttctgatgggttgagaactcctgggaagaagctgtgtctgtgaaggctaactcattagatagtgatgtggagacaggttggacagttgcaggcctgaaacctacttacgttttgtcttgggctatctttagccttctaaatagcctttctcatgcctacctctgtgctggatttaacatcctgtgataacagataaaacatgtattaatttaataaatctctaatttttgccaaccaaagactaagtgtgaccagatagctccaaatcatttcctgtacttgtgcttctcttcctcaaagacactggaggctccctgtaggggacagaggttgtgtctgctcttttgtcccccagattccaaccacacacctcagcatcactgagaagcagtgcagacaattccagactggtggcacaggatgcttcccactgtgttctggacatccctgcctagcactgataaacaccagtttatatcaactctgatttaagactatttgggatccagatgacaaatacaacaaatctcatccctgcagaatttcaagtttaatgcagtaagcagagcacacacaaatgaaagccaaagggataaataccatggaacatataatacacatgagtgtgcattgatacttcaattgaggtagtggtcttatctgaaatgagaaatatgcttgctacagccttgtcatcatcacgtacctgaagatggactgtatcaaatgtttcagaggtagcaatgtactactttactacttaaacattctgagtatcctttaagttatgcttctatttcccctgctttagtactaggcaaattaagttctaggactacaaagtaagggtaactgtatttacaaacaagggaatgcacagtttctcactaagtagaaaggacttctgtcttctggaaaggatgattttttggggggggtaacaattacatacattaaagaagatttattttatgtgtatgagtatcttgtttgtttgtatatacctgcaccatgtgcaggcaatgcctgcagaggactgaagagggcactagaaccccaggagcctcagttagagtgttgtaagcttccatgtggtgctgagaactaaacctgggtcccctccaagagaagcaagtgctcttaaccactgagcaatctcactggctccaagcatataatttctgaaaatacatgaggatataaacaaattttggaaggggtggtgtacatgccctactctagaaaaagtttatctgcacacatatgaagagaaatctgtgcttaggagagtagagtaagacatggtgcaccccaggctgacaggatggactgcacaaagctagactgcatctgacccaaggaactatacaggagcaaggttcgaaccttaagcatcttgaagcctggcagtaaggatctgcactccacctcagcaactaagtaggtcaggtcctggcgcttggccccaaggtgagcagcattttctcgaagcctctgtagaatgtcctgctcttcttcttccagtctggaaaggagagtctgctgttcctcatccagcctcctgtggagctcttcaaactcctttaggatttgctgtctgcggctctccactagtctctgagaacaagggaggatgctgtcaggaccaggaggcctgaaggagcctctcccagacccaccaggctcagtacagacttccttgtcacatggaagacttcagcagtattcatgtttctctccctgtgaggcaagtagtcacctgcacaccccccaaaggatgacttgatagttcaaatcagtgggaagatttaaaacaatcaatacttgacttttttaaacctaaattaactttttatattttaaagaatacatttaagattaaagaactcaatgatgtgaagatatccactgttagggatatcagagatatttttgctattttctactctgatgtttggcttatacagtctgttaaaatacaaatactagaacctgggtgttggtggcgcacgcctttaatcccagcactcgggaggcagaggcaggcagatctccgtcagttcgagaccagcctggtctctagagtgagttccaggagaggctccaaagctacacagagaaaccctgtctcgaaaaaaaaaaaggaaaaaaatacaaatattagaaagccaaagatttccatccctaataaccatgacacattaatctgataaaaactagagaacaaatagctactacaaccaggatcagtttaatgagttgatgcaaagtatatatttagacttcagggctgaacttgttttgcttgctgtttctatttgtttgttttgttttgttttgttttccaaatagggtcttgtaatatatagcacaagctagctttgaacttggaatccttctcccacagtctttctccttgaggacagcagcctcctttttttattatccctggagagctacgaggtgctcttgacaggcctgtctcttgagagtgagcctcagaacttcaatggaatattcctacatctcatgcaaagggacagccacctctccactgctcgtactcctgtgctcccaacccttccaccatcttgtttgcacacagccccacccacaggcttggcagaatctggctcctcattatcactgctctgaccagaggtgacctgatgtcaaaagggaggtgaagtgtcatcactcctaatgggtttatccttcttcacatctcactaagacactgtatggatttccctttgttacttcctccaagtcactactaacccgtagcttccaaaccaagacctaactcagacagtcacttacttttccagggtacttttcacatcctagaggaaaagagaaaacaaagtaagattggtcctagaattcatgggtcatgaaggcaaacaggttctccctcctccccaacagtgctaggtctttaaactaggcaccaggcaaactgagggcccagtgcaaggggcttgcttcagagggacctctccaggacatattccagatattgtttagtaaattagatgcttaaaatttaaaacatgcactctgccctgtgcctgagagccttcatccagtagctgttgcaagcagaggcagacacccacagctaagcactgaaccctactcctggaatccagttgtggaggggagggggaatcagcaaaggagccaaggcagtgctggagaaacccagagaaacaattgacatgacctaatgagagcacggagatcctagtcataaagctggagaaacagcattggactgaaccaagccctctgaatgtgggtgccagctaggagaccaaaacaatctatgggacctctaacagtggagctggttatccccagaacacaaatagactttgggagcccacttcttatggagggatattattacagcccagatacagcaaggagggcctgggaaggagttgggaaatgggatgggtgagttggtagggaacatgggaggataagaaaatgggggatggctatgtaaaaatgagtagtaattaaagaatttaaattttaaaagatcaaataacacttgagtacaggcagatgcagccagtgtgctgtcagcctaacccaagggggaaaatttttttttgaaacatgctcttgatagcagcacatactttaaggtctggcaaacatccttaaagttgaagaatacaggattcagacagcagtcaccccattctctgagggtcatcagcacaccctcctccctctgtgccttcctgtaaagtgaccatccccagggaaggggtctaaggaccttgtgactgacagggaggcaccactcaaaagacaaggagagatgggactctgaaacaagagggcagggacagagagtcagtgccaggctgaagaatggctgggattaaacaagagccatgagcctcacaagcttggcagtcctgatctgaagctacttctactgccacagacaacagatgggctttcattgcagggctccttgctgctttctcaggcaggcagtggaacaggatgcattctcacctttgtcctgaacatggatttgcaatggggtggttttagaagcaggtgtgcttgattgtacttatgagattttcttttaggggcctgagacttgccttggtggttaagaatgcttgcttctccctgggagttggtggcacaggcctttaatcccagtactcctgaggcagaggcagaggcaggtttatctctgtgagttcaaggccagcctggtctacagagggagtgccaggacaggctccaaagccacagagaaaacctgtctctgtctagaaaaaccaaaaagaaaaaagaaaaaaagaaaagtatgcctacttctcttctcttccaggggacttgagcttggttcccagcacacacactgggtagatggaaaatgcctgtaactctagatcctagggatctgatttgttctcttctggtctctgagggtgtgtacatgggcaggcatgcacacatacatatatatacacatacacatacacatacacaaaaacaaaccacaaaaagagaacactgtattttgattttcttacacttcaccaccaagttgcttgggagtctgatgacatccccctcaggttgaactcacatttgtttcacctgataatgtcacacaccggtgcaagcctatgaccatgctacagtgcctttttacatatcagactgtattagaaagtacttctagctgggaggtgtgtgaatgcctttaatttccatattcagaaggcagaggcagacagagctctatgagttcaaggccaagtctggccaaaatagcattctaggccagccaaaaatgcatagtaaagctctatcacacattaaagatttctctgtgtagctttgtacaccaggctggacttttgtaggaactcacagagatcagcctgcctttgcttctcgagtgctgggtcaaaggcgtgagccactaccgcctgtcttgttggtaggtttatcttatctgaatttcccaggctggcctgttctggctctgaacttgtgaagtgaacttgtaatatttcttctccagcctcctctgtgataaccacaccctcttcataagcttgtattttctgcctgttgtggtggtgaactgatgcctttccctcaacccttacacaatttttaaattttaattttttttaaacagggttttactgtacagccctggatgttctcacttgcaaccctctcctgtcttagtctcctgacttagtctcctgagtgcgaggattatatgtatgttttatttcctcaaacttttgtaattaaaatttttcaatttacttttatttcatgtgcatcggtgctttgccttcatgtagggctgtgtgaggatgtaggatcctctggaactggagttacagatagttctgatctgccatgtgggtgctgggaattgaacctgggacctctagaagagcagcagtattcctaacagctgagacatctctccatgtgcatacaaactattttaaaggagttattgagtccaataacttttataattaaatttataattaaagacagcagttacatttcggttcaaatattaccatggcttcaggagaaatgccttgcataggctcatgcatttgagcactcggtccctcttaggagctttgcagaggttaaagaaccttttggaggtggagctttgctgcaggaagtacgtcacagggacaggctttgagagtttactgatttacccttcttcctgtttgctccacttcctgtgcttgtatcaaaatctgatttggcagggcggtagtgatactcgcctttcatctcactactcaggaggcagaggcaggcagctctctgtgagttcaaggccagccggatctaaagagagagggccaggataggctccaaagccacagagaaaccctgcctcaggaaaaaaaaaaacaactgatgtggcagcttcctgttcctactgctatatacactgccttcctgacattgcagactttccttctggaactgcaagctaaaataaaacttttaatcctaaagttactctgccgtcctggcactggcccggtacacccaggctggccttttgtaggaactgacagagatctgcctgcctctgcctcctgagtgcgccaccaccgctgccccatgtctgtttacttaaaaagtatttactattgtgtgtgtagtgtgcgtatacacacagtgagtgtgtgagcatgggggtcacagtgcatggatggaactcagatgtctactctgaagattcatttttacatttctaccttcatgtgggcttcaagtcttgattctgggacagcaaacatttgtatgcactgagccgtctcgtcaacaccttcatttcttctatccttctcctcagtacttaggtgataaagctaatgaaatatcacttctagagaacagcagtttccagttaaatcaagtaaagtgctgttgattggctcataggcaaatatccagccaagcagtgaaggcaacagattgcctgctctaccttgagctcccctggtttcttttcttcagaggctttgcagcggctgatatcccgaagcttctggttcaggagctcaaggcacttctgcagtttctcctgagggttgggagaaagtaggagaggagacatttggagttagaggatactcaagagcttagcccatttatcatctcttttgttttcagtcatgtgaatgtgcaaatgtctgtctgagtgtatgtgcgtacctgtatgctggtgcccacggaggcctgcagagtgcatcaatcaatcagatcccctgagactgaagttataggcatcagtgaactgtcagcctggtacatgctcttaactgctaagtcatccctatactcattgactattcttcccttgaagcacttgggatcaaatgcagggcctcaagcaggctggcaaatgctctacctctaaggcacattccccactcctaaatcatttaatttctatcctctcatcacttcatgatctaaccctcttccttgcctacaactggacctttcatagatgtctttttccctgccatgtctgtggcacacctgactctcctccctgaatccagtaggctagctgtcatcacttgtttcctttcccactctattttcttatggacaactgcccatcacaccactcctagttatgtttgttttgttttgtttgttctggtggtgctgagactccatgcagcgtgagtgcactaagaacacagtctgttaccaggtcacaccttccatcagctagaagttaccttttatatctctgtctatctatctgtctgtctgtctgtctgtctgtctgtctatcctatcactgtaaagtttccatcagccaggtcacaccctctcttagctagaagttacctcttgcacctcaatctctttatttatttatttatttatttatttatttattcattctttcattcattcattcattcattcatggtgaggtctccagaagcctggccagcttcaaacttgtggccatggatgaccttcaactctccttcctcctgcctccaccctctgaatattgggattataaatgtatatcaccatgctggtcttgatattcttttttaacctgtgcttccattcagatctaaccatttatcaacaaaacaaaactcgactataaattacctgaaatatttttcaaaattttgttaattaagcagaatgagtggaaacttgactgttagcatctatttttgttattattactaaaacatttaccccatgttctctctagtaatttaaatgttaaatgtcaaattacgcatcttttgaagaacatgcagactggttctgcttagtctgatggatattagtctaaagtgacgttagctattccccccaaaaaaatgagaaaaaagaaaagaaacagcctgagtaaataggcataaataaagaaatcaatacagtttcagttcttccaaaatatttttcagactcttttgctgttcacccattcgtttaaaatctgacagattccagaaccatacccaacagaactctgaagacttaattttattgcagtaggtcagacaaatctgtgggcactccccagtgctcctgttgagggggagggactagatgtcctgaatacccatgtacatagttctgaggggaatggagaggaacagagatagccttacctcaggagcttaaatccctctaactcagagagtatgtatgctctttcctgcacaggcctctccagtctggacacccacccaccttgcactcttttgtaacatcatccagttgcagaacagtgtgagcttgctgggtatgatatattgcacatgtcggacagacagcctcctggtcttcgtagcagaggaggctcattgcctcctggtgttcaaaacaaaggttttcttctctggttttctgtctgacgcgcttgagatatttggcgatttccaccatacttcccagttgtctattaggccagagattctggtattgggatgtctttcggcagaccgggcaagggaagtcctgctctaggtcctcccaacagcgggtgatgcagactttgcagaagttatgcccgcattcaaggataaccggctccttcagatattccaggcacacggagcagtttgcctccacttgcagattctccagggcagcagcggtggaggctgccagggcttcaaactctaacatactcctcttctctgccattatttaacttagagatggggagagagaaaaaaaatattagttggagggttacatttcttcttgcactcctatcctgacattagctcccataaagccccatcttggtatcttcccacctcttccaatagactcacctgttgctctgtttacagcatttgcgatttgtagctaatatacacttgccttttctgattcagcaaacaaaagcagtccctagttacctttttggttttttgagacagagtttctctgtggcttggaggcggttcaggaacttgctctgtagaccaaactagtctggaactctcagagatctgcctccctctgcctaacaagtgctgggattaaaggcgaggcccaccactgcccagccctaagtgatctttttcacctgtgttgtcattacaaacagaagcttcctttaactataatagatgaaaaaagagcctgatgttgtggcacaaaccaagaagccctgcatttctgaggtcaaggcaaaacttcaaggccaacctgggttcccagtcaggtgagagtattcagatctctaaagggtgggaaggaagcctaggaagtgagctttgtcacataagccaaagtactctagctggtagtggtaactgactgtgaggcaggaggatcagatcaatacaagcaagaggctagcctggtctgtaaagtaagatcttgtttgaaaattattttaaaataagatagttttcaaggtgttttgtttgtttgctctttctttctttctttttttctttttcaatgcagctttggctggcagtactagacctcattattatggatttttgtttttttgtttttaaccattttatttatttaatatgcatacaacattctgctgtcatgtatatctgcacaccagaagagggcaccagatctcataacggatggttgtgagccaacatgtggttgctgggtattgaactcaggatctctggaagagcagccagtgctcttaatctctgagccatctctccagcgcggatttttgtttttaaaagaacttcatacatctacattaaaaaaaagaaacaaaactgttttttactgggcggtggtggcacatgccttggatcccagcactctggaggcagaggcaggcaaattctgtgagttcaaggctggcctggtccctggtctacaaagctacacagagaaaccttatctcagaaaagccaaaaaccaaaaaaaagagaaaaagacctgtttcttatagtgtaacacatagaagttttagaattttttttaaaactagagtttaaccttgattgtctgctactcctttttcaaagggtaacacactgaatgagttacactacagtaacaaattccatacagggaaatgtgaaattgttgtgcccagattgctgaaccccaaaagaacccaccaacaaggagacaactcctcgaagcaaagacaaaggtttgtttattgactcgaggataccagctgcagcaaggaccccattgttttaagaacaaatggagtacccactttcaactgagggctgtttttataagggaaaattgtagggctggcagcctcaagattacaaaacttccctggttacacaggatggaacaatgaatatatgcttagcaggatgctgcagaggaaatgaatttgttaattatctcctgagctgagggcttctataatttataactgctgatcctctttggactagaggaatgtctacacagctcaagggtatgctatctggtctaagatcaagtgtcaggtaacttttgtttaaccttgtctgttgggctgccttttaggaactcggagaagtttaagagtttttctatttgggctttggaatccaggttttagacttttattaatgttctcattcaaaatcattcctcctttccctggacaagccaaaaggaagaatgcctagatgtgtctctcaggcattgatttttttatcagtttgccgctggaatggttgcaaagcaacacatatttcaactctaggagaacatgattgagcagagggtgatacctttttaaagagagctggcaagttccagccaccccatgccaccaacaaacacccctgactactgtgaaatgctcctggttgtcctggaactccgtctgcagactaggctgatcttgaactcacagagatcagcctgcctctgcccccaccccccaattgttgggattaaaggcttgccccactacacgctttgagtttagaatttcaaagttgatacagataaattattccttggttattccgtggattgactaggaattaaaagaaggaaatttgggctggagaaaatggctcagtggttccaaacattggctgtccttccagaggaccagggttcaattctcaccacccacatggcagctcacaactgtctgttattccaattccaaaggatctgatatccttatacagacatatatgcaggcaaaacaccaatcaatgctcataaaataaaaataaatggggttggagacatggcttagtggttaagagcactggctgatcttctagaggtcctgagttcaattgccagcaaccacatgatagctcacaatcatctataatgagatccagtgccctctaccagcctgcaggcagaatactgtacacatgttaaatacatcttcagaaaaaaaaaaaaacaaaaatgaaattttccatgtatgactgcacatgcttggagcatcagtagtcaaggctggattaagtatgaccaccatgtcaactgaaaagaggcaagcaaggcaggtgttggtggagcatccctttaattccagcactagggaggcagaggcaggcagatctctgtgagtttgaggccagcctggtctacagagcgagtgccaggataggctccaaagctacgggaggttatgtgattttgctggagaggtgggtctcacgatgcaaccctttaaaaaaaaaaaaaggtacatgagcttgttttgtgccgaagtcacaagaatgcccaaagagaccagggagacagaacactgatccaaataggggaggtttattgattgttctattccaccatgagggatccggtttagcaaagtgacagaacagcctccagagtaaagttcactgtctactgctagattataaagacaaaagttacaggattacatcagtaggtacgggctggattctgattggttgacttttgggaacaatcaggagaatttctcaatgtcattttggcatgaaacacctgtgcaacaattattttccttggtcagtgctgagaggaaacattctgtggtttctatggctttgtgttgttacttgaggtggactgttgttcatagataccaataattttcaaaaatgaatcctggatactacaatggaggttttgttttcttcctgagtttcttttgtggtcaaacagtttccaggaaccaagtatctaggaggctggagtgaggggtctgcagtctttgtgttcagtcttggcactagggtgagggaggccagaggatctggagtttccttgtgtcagagtcctataggtcttatgtgtagcctgtcatggctgctaaagcatgggatcagtgagggtcttgtccctttatttctagaagtgaagcctttaggtttagtttacccctttcagtaagaaatgctgattctagatttccaagcacatcattgtatgggggatgtaaggtagaaggggcaccagagccttaagacaagggctgctcactgggacagagtggtgtatggaaaatgggaattccctgaatggtggatgcagagatgtaaggagaggttaccgtgatgtccgctcccccaacaccacccccaccaaaaaaaccaaccccccccaaaaaaaaaaaaaaaaaaaaaaaaggaaaataatataaccagttgaaataccaaagaatacaaagtcaaacaaaattcaagttttatttatctggaaaacggagtgaattcatcattggtgtttgaagcctgaggctgtgggttctccttatcgaggtgggctatgtttggcagaggttctgatggtttgaaatctggatgaatcaaaggggaagaattagtttcccaagactgtggcacccctagtattgatcaggcttggctaccttgctttgccaccctccaacgtcctttctgttgggggcttcctcatctacccctgacactgctcacctgcctgattttccagctgggcttcaggtcggtcaccccagagcagatgcttggggtcattgaggaaccgctggctgcgctggcatgtcaggcaggtctgcactgtccagcgaagacccttttggcctagatcaaaagtgaggaaaaaaagaagagggtgaccaggtttctgagaaaagcgtcttatttttttggtttgcagttttcttctactgtcagcaggtaataaatgaataaatcttcaagaaaaaataattttattcatacgtgtacacgatagtgtgacatgcatgagattcatgttgagtatgtgcacaggatccttcaagtgggtgtacagcgtggaggacagagatctagtttgggtgtcttgctttactacaattctccatttcgttgtgggacagggtctctcactgaatctggagctagatgtttccagttagattggctgaccagagaggccccagaatctgtacatttttatctggctcccacgggtattggagataccaagtcaagccctcatacttgcacatccagcaccttgcacactgaacccgttcccagctctttgacagcaagttttcatgtgtgggaatcccaaccaatgtctgactctgtttatcatgacatccatacttccctgccacttcccgggttgaaggaacccaggactccactttcttccaacacaagcctttaaaaacactactctagtagctgggtgtgttgtctcacgcttgtaatcttaaagctagggatgctgaggcaggagatttcagggagttggaggtcaattttgggatgcagtgacacctgtgtcaaaaaaaaaaaaaatcacaacccaaaccaaggggaggttatgtgattttgctggagaggtgggtctcacgatgcaaccctgtctggcctggattatgtagatcaggatggccttgaactcatggagaccacctgcttctaccttccaagagcttggattaaaggcgagaaccactcagctggtggtacttaatgcatcctagagattaaataagcacatagggttaatttttttttttttttcagactacagggtgtcaggtagtccaggccggttttagggacaaatcagccgcagaccggcttcccctccaggaggaaggagctgctgcccaccacggcgccagggcgtcagcactcacgtctctggcgctgggtgcaggtgaggccggggatgaggagagatgagcagccgcgacagagcgtcctcttcaccgaggggtccctgggggaagagcagaggccgtgggcgccggctcgcccgggtcccggctccgcccgcccgctcgccctctagcccgcgccttactgccgcaggaccagcgtcttctccgtgtggcagtaaaacctcgccagggcctggttctccgggttctgcgacaggacgcaatgtgcagcctggggacaagaacggcagcccgggtcattccgcggccgcagcaccggaccgcccgcccgcccgcagcgttgtctcacctggtacaagaagctgagtctctggaaggcctcccggtccttcactgggcccgccatgagtatccgcccctctcggcggatgccccgccccagacccgcgcaaggcctgccgggaactgtagtgtcaggcaccacccgccctgtgcatccttgcctgatggaggccccagtttggtattcctaatgtatttattaggtagggccccgcggggctagtggagcaggtaaaaatctcaaaacagggaaatacttccaggacggacgtctagacttgtcgtgtacggagaggactgtgtgcagtatacacatcaggctagaccctcttactctcctgaagccaaagacagatgtctggaacatccgtggactgatgtaacacaccaaaacaagcaatgtgtagcttcgcgttatatttgttatcccagcacttgccgcgaattacatacaaagtcaaaacgggccaccaggctggaccctggctcaaaaccagaaagaactggtacctgtaaggctcaaagtgggaaaggtcattgtcatgagggagggatacggaaactggacaaaacgtccctgaggaaagagtttgccctcaggagaaacaattttctcccactttcccacttattaaagaagacgcttgctgttacagtactggccacatggcagtttctatggcacagaaacctgccaacactatggcctctctcttgctaaccattactaactattccctcttaatggctgagcacacccaaggtcagaagcagagggattggagctgaatccaaagttgaggacttcaggggacatctcttcctgtcaccaggctcctgccaggatatccaggtggagaaccaggcttcaggctcagagtaaggagattagctgaaatttaccctgggggtggtgttttgtgagggcctaccgagtcagatgaggagtgtggtggaatgtagattcctagacctatccaaacctccattaaggacagagggtgagacccaagaacatgtatttttcatagccagtgagtctcacataaggccactgccaaatcaccacacaactcagatcacatcagtggatcctttgttccatattttgaccaaccaaattatcttgccacaaagaaccacagtcaaggcacaaaggtaagaagagagtggacaatgtcctgttgaggtgggagaacggaaatgccctcgatgcagtttctcgtctcagtcttgtacccaagcagcaggtaatccaggttgtttggtttggcatgcatctcatcaccttttgtgacaacatatgtaccctatgggttgtttattttggcctaacttaaaatgatttacattctctgaaaaggggaatgtcaaaggatggtaatagaggcgaatgaagctgtctctctgggccttttgctacaaaaactaccctcttctaccctgttctcacggggcgagaaaaactccatgacctttcttcctttctcgcttaaacacctaagccaggggtcatggcagacaacttgggaataactacttttaacatctttaaggccagggctttggacacaccattctctttcctccaatagctgactcttccccaagttcccttgggaaaactgtggaagggcagatgcctgtgtcctgtaggatcacttccatctcacctccagaggggagaaaggtgggcctacttcttggagacacccaactgcagggtcagggagaaactgggttctcctttctgcctcccttatccttctccacaaactccaacctctggctaatcctatgggtaatggtaacattaccctaggaagggaaaaccaaagagatccccctcttcttcaattcctttctagagggtcccgttatcctcttccctgatcctactcctgaactgaatgcccaatctctgccctcagaaaagcctctcaattctacaatcataacagcagcagccactcatctttccaacacagaggtacacaaatccctatgtgctccctcaaggacaaggctacccttgagtcacagaagcctcttaaaggtttctgtctcctgcactttaagcaagttaagactctttcatgtcgactttctatttctagagaggccttttctttacaatcagtcattgtgcagtaggaaacctgctggacttcagagattacaatcccctggggctcactctcccactacagttaagtagggacactcatctgtgctgtcaggcagcccagtcctgtctctactcgttcacacaatgcatcccagagaccaggtggtttctcaagatggctgaggactggaaccacgttgacaccaagctatcccagcaggtcacagtaaggaagacctgttgtcactcttcaccctgcctcaccccaattaggctccatgtcttgtcactcccaatctgttgggggcctgatagtaagtggtgcagcattcttccggccagcccggatccctgggtagaagaggggccaaagtttttcagtaaaagtgtcagtgaaggtatagatatgtgagcggtccgtgacgttgtaaaaagacaatgtgccggcctcatagtctaggaatatgcccaccctcttaggttaagtttctcagatcatgctggctcttgttgtattgaagaaagaaaaaaaaaaaaaaaagtcactgtctgaaggaggcagggagggccagaaagaaggctccagatcaagtgaactgcaagtgtgtgctggggacagggtgagcatggtcttgaatcctgtaacagtcctgctctgtgactgcttttctctacataaatgttaatgatgtttcctttggtcactccctttgattgatgcgtcaggaaccctttaaagtttctaggtccctagagagcagatgacacctaagcgttcttacctcaagtctatgatttaaggtggggcagggggggactggcactagaaagaggaagaggaagccaactccagggctctgaaccttccactcctctgcatgccctatgccagtttcctttggggaacaactcaccaattagctgtttgaggattttcctgaaaaaggtccccagaacactgtaggttggttaagtttctcaaatcatgctgactcttgttgtattgaaaaaaagagaaaaaaatgaaagtcactgtctgaaggagggagggagggccagaaagaaggcttcagatcaagtgaactgcaagtgtgtgctggggacagggtgagcatggtcttgaatcctgtaacagtcctgctctgtcagaagtacatttaggagcaaagttagtgtccatgcacaagtaggttacagatggttttcaattcttcaaatcaaagggaaaatggtctattcctctatagatatatctagcatgtgtactcatgaattcatgttttctgtccttttattgtaaatattcaatatggacacattcgaaattaaattagaagaaagaggttctataaatctgtcccgcagatttacctgctgtaaatcttgggcttctagcatcactcagaagatgagtgtgcggctcttggtgtaattcattcctctgttccagtgggtaccaaatgcagacttctcttcttgcagcctagaaggaaacagagactgtgcaggagttgttggcttagtttggagaatggggctgggggtatggactctattctttttggttgagaggcccagaaaacttttcttcctatgtactgatagaaatatctaaagatccagaaaatgttgaataaatttgttattatcaaataaatgatagatagcatccctctttatacttcttaaaatgaagtttatcttatttgtgtataatattcaagaacagtgtagcatttctttcatattcctcaatgattggaagcaaactaaagatctctaaaaatttttgtaaattgttttttttctttaaatgttatttcaatgcccagtatatggctagtatatggctagtttccagctgacctgcgctatggaagatgtttcccctctgtgtgcgcatagcccatccctgtcattcatattctatggaacaccagtttgtccacaaagtaattaacttcatagtgctccccaaactgattttgttttatgattttaggtctcgtcagcctatctcggcccctctcttttcatgtcctgacaaaaacaaggttaatttcatcccaactggatcagctttctgtcctgtaaaacttctaggccctctcctacctgcctctgacctgatgctcaagaactctcctaactctggccagagctcaactctggcaacactaaccgtagagcagctctcttcccgggtttccttcacgtctctttctgatgacaccagcacagcaggctccctggagacctctgtccagcagccatctcagcagcagcagcagcagcagcagcagcccccgttatgcttctatttcccctgctttagtactaggtaaattaagttctaggactggaaagtaagggtaactgtatttacaaatatgggaacacacagggtatcactaagtagaaaggacttttgtcttctggaaaggattatcttgggggtacaaattacatacattaaagaagatttgttttatgtgtatgaggagctgcagttacagagtgttgtaagctgccatgtggtgctgagaactaaacctgtgtcccctctaagagaagcaagtgctcttaaccactgagccatctcactggctccaagcatataatttcccgaaaatacatgaggatataaataaattttggaaggggtggtgaaaatctgatgtgcccaactctagacaaaggtcctctgcacacatatgaagagaaatctgggcttaggggaatagagtaagagagggggcaccccatgctgacaggatggactgcacaaagctagactgcatctgacccaaggaactatacaggagcaaggttcgaaccttaagcatctcgaagcctgactgtaagcacttgtcctccacctcagtaactaagtaggtcaggtcccagcgcctctccccaaggtgagcagcattttttcgaagcctctgtagaatgtcctgctcttctttttccagtctggaaaggagagtctgctgttcctcatccagcctcctgtggagctcttcaaactcctttaggatttgctgtctgtggctctccactagtctctgagaacaagggaggatgctgtcaggaccaggaggcctgaaggagcctctcccagactcaccaggctcagtacagacttccttgtcacatggaagacctcagcagtgttcatgtttctctccctgtgaggcaagtagtcacctgcactcccccaaagggagttgatagtgtaaatcagtagaaagatttaagataatcaatacctcattttttaaacctaaattaaccttttatattttaataaaaaacattcaagattcaagtactcaatgatgtgatgatatccactattagggatatcagagatatttttgctattttctactctgatatttggcttatacagtctgttaaaatgcaaatactagaaagccaaagatttccatcactaataaccatgacacattattctgataaaaccagagaacagataagctactacaatcaggatcagtttaatgagttgatgtaaagtatatatttagacttcatggctgaacttgttttgcttgctgtttctatttttttgttttccatatagggtcttgtaatatatagcacaagctagctttgaacttggaatcctccttgaaaggttcaggcattatgctggcctgcccatgttacctggtggaagaggcagtaccctggtctgctctgggttccatgggaactaagtctgcatgaaggtgcagaggacccctttaatagacagatccctgggctggagagatggctcagaggttaagaacactgactgttcttccagaggtcctgagttcaattcccagcaaccacatggtggctcacaaccatccgttatgagatatggtgccctcttctggtgtgcaatgagatatacatggaagcagaatgttgtatacataataaataaataaaatctttaaaaaaaaaaagacagatccctgcccatatatgctctctctacacttctctctatatactctatactctcctctgtgcttctgcttctcttctctctctccctggcgaacagccatggccggtagcccttaaccctgtttctcttctcctttagtctccctactctgctggacctgtaatatactggttaatatgtctaatatgtctcttagtcttatgtctcatctgccttttttcttatttatttttaacttaaacaaaagaataacacttctaacttgtgggcatgcaccctctaaacatgttaaacattttaagtcatttctgatgggttgagaactcctgggaagaagctgtgtctgtgaaggctaactcattagatagtgatgtggaggcaggttggatggacagttgcaggcctgaagcctacttacattttgtcttgggctatctttagccttctaattagcctttctcatgcctacttctgtgctggacttaacatcctgtgattaagagataaaacatgtattaatttaataaatctctaatttttgccaaccaaagactaagtgtgaccagacagcatctgaggcctatagctgagattactccactttgctgtatacatttcaggtttccaccaatgttccttaaaagtgccttgctctattctttttttattgtgttctataaaacttcatgaaaccatttctaagttgaagcatgtaagttgggttaaactaaatctgtgtttcaaggccttggtctctcatatttgccttcagaataaattcttatcccctgtgatgggtggtgagagttgttttttgtgttgacagagaataggtatttaccattccaggatcatattccagatattgtttagtaaattagttgcttaaaatttgcactctgcctgtgcctgagagccttcatccagtagctgttggaagcagaggcagacacccacagctaagcactgaaccctactcctggaatccagttgtggagagggagaagggatgagcaaatgacccaagacagtgctggagaaacccacagaaagagttgacctgacctactgagagcatggagatcctagtcataaacctggggaaacaagccggctgttggtggcacacgcctttaatcccagcactggaaggcaaaggcaggcagatctctgtgagttcaaggccagcctggtctccaggtgagtaccaggatagctccaaaagctactcagagaaatcctgtctcgaaaaaacaaaaaacaaaaacaaaaacctggagaaacagcattggactgatccaagccctctgtatgtgggtgccagctaggagtccaagacaatctatgggacctctaagagatgaaccagagtttatccctattacacaaatggactttgggagcccattccctatggagggatactattgcagcccagatacagcaaggagggcctgggccctcccccaaatgacatgacagactttgaaggttccagtgtaggagttggtggatgagttgggggggggctgttagcatgggaggatggtagggtgagagaatgggaatatggatatgtaaatatgagtagtaattaaagaattaaataatcaaataaaaagtgagtacaggcagatgcagccagtgtgctgtcagtctaatccccccccccaccaaaaaatctgaaacatgctcttgatagcagcacatactttaacttctgtaaacatccttgaagttggagagcacaggactccgacagcagtcaccccattctctgagggtcatcagcacaccctcctccctctgtgccttcctgtaagtgaccatccccagggaaggggtctaaggaccttgtgactgacagggaggcaccactcaaaagacaaggagagatgggactctgaaacaagagggcagggacagagagtcagtgccaggctgaagaatggctgggattaaaaccaactccagggctctgaaccttccactcctctgcatgccctatgcctgtttcctttggggaacaactcaccaattagctgtttgaggattttcctgagggcaaagtactgccgggggaaattactgaagttcttttccagctctatagatactgttgtcacctccatggtcttcaccttgtcacatctgggagggatgggagataaagaaagcaaggacagggtcagggagagccccagccgaatgatcatgtgagtggtgtggtgtgttttctggagaaaagtgggacaaggcctctcccacagtctttctccttgaggacagcagcctcctttttttattatccctggagagctacgagtctggtctacagagggagtgccaggacagcctccaaagccacagagaaaacctgtctctgtctagaaaaaccaaaaagaaaaaagaaaaaaagaaaagtatgcctacttctcttccaggggacttgagcttggttcccagtacacacactgggtagatggaaaatgcctgtaactctagatcctggggatctgatttgttctcttctggtctctgagagtgtgtacatgggcaggcatgcacacatacatatatacacacatacatatacacaaaaaccaaaaaaagagaacactgtattttgattttctaagacttcaccaccaagttgcttgggagtctgatgacatccccctcaggttgagctcacatttgtttcacctgataatgtcacacaccggtgcaagcctatgaccatgctacagtggcttttcacgtatcagactgtattagaaagtacttctagggctggagagatgtcacagaggttaagagcactgactgctcttacagaggtcctgagttcggttcccagcaaccaatggtggctcacaaccatcccttatgagatttggtgccctcttctggtgtgcagatatacatggaagcagaacgttgcatacatgataaataaattttttaaaaaaagcacttttagctgggagaggtctgcatgcctttaatttccatattcaggaggcagaggtagacagggctttaagagttcaaggccaatctggcctaaatagatttccaggccagccaaaaatacatagtgaagctctatcccaaaataacaacaaagcaaaacaaaaaatcccatcactttatgatgttattggataggacagtctctttaaaattatgtaggtaggttatctttttttgaggtagggtttctctgtggccttttgtaggaactcacagagatcagcctgcctttgcctcccgagagctgggtcaaaggcgtgagccactaccgcctgtcttgttggtaggtttatcttatctgaatttcccaggctggcctgtgcaggctctgaacttgtgatgtgaacttgtaatatttcttctccagcctcctctgtgattacaggtgtgcacaaccacaccctcttcataagcttgtattttttgactgctgcgttggtaaacagatgccattccctcaatccttacacaatttttaattaaaaacaaacaaacaaacaaacaaacaaacagggttttactgtttagtcttggatgttctcacttgcaacccgctcctgtcctagtatcctgagtgtggggattatatgtatattttgcttcttcaaactttaataatttaaaaaatttaatttacttttatttcatgtgcatcggtgttttgccttcatgtagggctgtgtgaggatgtaggatcctctggaattggagttagataattttcatctgccatgtgggtgctgggaattgaacctgggacctgtagaagagcagccagtgctcctagacactgggacatctctccatgcccctacaaactgtttaaaggagttattgagtccaattttggaggttgaggtgatagggaagcaaaggggcaaaaagttggggtaggacaaatttaaatcacagagggaatgttttgaattgcagtttaaatacacctgaaataaaaatttataattaaagacaacagttacacttcggttcaaatattaccatggcttcaggagaaatgccttgcataggctcatgcatttgagcactcggtccctcttaggagctttgcagaggttaaagaaccttttggaggtggagctttgctgcaggaagtacgtcacagggacaggctttgagagtttactgatttacccttcttcctgtttgctccacttcctgtgcttgtatcaaaatctgatttggcagggcggtagtgatactcgcctttcatctcactactcaggaggcagaggcaggcagctctctgtgagttcgaggccagccggatctaaagagagagggccaggataggctccaaagccacagagaaaccctgcatcagaaaaacaaaacaaaacaaaacaaaaaaacaaaacaaaacaaaaaaaactgatgtggcagcttcctgttcctgctgctatatacactgccttcctgacattgcagactttccttctggaact

SEQ ID NO: 9 - DNA, 931128 bp, Cricetulus griseus
  source 1..931128: mol_type = other DNA; note = LOC100768845 Contig Sequence
  misc_difference 1..931128: note = N can be a, c, g, or t
atgctcaggaagagactagatccccatctttcactgtatgtaaaaaaagaactgaaaatgaattaaagacttaaatatgaaatgtgaagctagccaagtgttggtggcacacacctttaaccccagcactcgggaggcagagacagatggatctctgtgagttcgaggctagcctggtctaccgatcgagttccaggacaggatcaaaaacaatatagtgaaaccctgtctctaaaaacaacaacaacaaaaatatgaagctgatattactagaagaaaaagggttaaatgctccaagacattggcatgagcaagtactttctagataagaccctcaaagaccagaatcaaaagcaaaattagacaggcaggatttgccaaaccagggttttggtatagcaaaggaaacaattgagagaataatacagtcacagaataggaggaactcattgctgtttataaactctggttaacttataagactttcacaggattgagatcattaatatttatttcatcatcaatgggggaggagactatgaggtactgtccttcccaaaggaactcttgccaatgaatagttcttggcaggagggtgtcaatttcttcagtagggtaaccactaataagttgcctttgctccactaaataactttccacccaatttgggcaagtaactcttattaaactcagtgggctacacatcaaaataagacataacttgctgtagagaagaagggttctagtggaagagatatgggaataaaggagggaaatggttagtgacaccaggtcaagtcatgagcacctgacttggatgtgaggtactaaactcaggtcctctggaagagctgcaatccttcttaactgctgagccatctctccagcccattgtaactgatatgccttacataaaagattcatgaatttatataatgagttttagtcattttcttttttccagacagggtttctctgtggagttttgaagcctatcctggcacttgctctgtagaccaggctgaactcatggagatccgtatacctctgcctcccgagtgctgggattaaaagcatgggccaccaacgcccgatgagttttagtcatgtttactgtccattatttgatttaattatgtcctcttgtggcctcctcaggcatctgcattcacatgtgcatacccacatatagacacacatatatacatcaaagtcacaaatataaaactttataaaaataggcaccttttctgcccattaacagtgaaattccctccacaaaattaagagatcttatttataataacatgaaaaggaataaaatatttagaaataaaattaactaaggaggtaaaaagacctgaaaattgcacttaaaaactataaaaacctcatactaaaaattgaaaaagccacaaataaatgtaaatgcatcttgtgctcagggatcagaataaagaatattgccagatctctgtactattcaaacaagtctatagatctactataatctctataaaattatgagatcatttttccattgaaatataaaaatatatctaaattttatatcaaaccaaaaagggacaatgatatcaaaagcaaccttgaatatccaaaataaagctggaagcatagcaatctagatttttaaattgtattacaaagctataataatcaaaacagtctgaggagctgggcctagtgctatacgtgtaatcctaccatgtctgtaatctcaacactaaagaggctaaaacaagaaactcagaacttcaaatctaccctcagctacacagcaaaaatcctatctgaaaaaggaaaaggaaaaaaatagaatcagaggaaatctttgccagctatttatttaaaaatgactactcaaatgaataaatgcaaagtaccaataaatatatgtaaaagaaatgtttagcaaccccatccaacagagaaatggaaatcaaagctacaatgagattttatctctccctattaagaataactatcaagaaaacaaacaaaaagtgtggcaatgattggggtgggggggttgatacatttttggtcagaatgtaaattgcaacatccactgtggaaatcaccatggagtttccaaaacaaagaatagaactaccatgtagttttgtataaacagtgaagaaaacaatagaaggaaaaaataacccatcatataagaggacatagctgcctaccatgtcactgtctattcaaaatgtataaagattttctaaaagtcagcagcaggaaactccaaataatttaatttaaaatgatcagaggacatggataaccacttttccaaggaaggagtacatacaagtggccagaaaatatacagtaaaattcgtggagcaggagagatggctcagctgtgaaatggtcttactgctcttgtagaggaccttagttttgttctcagcacctatgtcaggtggttcacaaacacctgtaattccagctttgagggatgcaatgtcctcttttgaccttcacacacatgcacaaacccacttgcagacacacatgcatatgcataattaaaaatgaaaatatgtcttttaaaatttgtttaaaaaatccttatggtcacctgatcatcaaagaaaagcataatgagaaaccatatcactctagttaaaatggatattattagaaagaataagttctggtgaagatgtggggaaaaaagagaaatcttgcccactgatagtaggacggtaaattagtacagccatatgaaaaatgacatcgggatttcccgaaatattaaagcagaagtgtcatacgactagccactcaactgctgactacatctgtattcccatgacagttgcagcactattcaaaatagccagtaaatggggtcaatctaagtatctgttgatacatgacttgataaagaaaatgtggtttgtctacaaatactattcagccttacaagggaagtcatgccaatttgcaaccaacactgatgcatctgaaaaataagtatgctaagtgaaagaggccatacacaaacaggcagatagtacgtgaaataacctatatgtaagctgtgaagtgtttaatggcacttgtcaatgattaaggggtggggaaatgcaaagaacttattttaagcatacaaactttcagttttaaaatgagtgtgtgtcacagataaaatgaacagcatagcacagtgactatggttaattatactgtgtcatgttctaagcactaagttttcgagtgttctcaccatatacatgcatacacataaagataactgtgcctttttgaacatatatgcatatatgtagaaatattaaatttaaaatgcataaagcatcatggttcttttttgttgtgtcttttaggtggttggttggctgtgtaaagatgaaacctattgattagttccttcacagccactgaagtatcagaaactccctgaagtggatgatgaagacaagcttcatactttggttcttttttgtctgtctgtttcttgagacaggatttctcctattagaaacacgtgtccacagaagtagctgggtggagagtggaagtgcttatgttttgagtcagttgtgggaataacaaacatggtttttcatgaagcaaagtgtcttgactcacagtgtagtgaacttgcttttgaataaaggaaattcttattacagaccaaggaggactggagagaggaatcctaattctgtccgtggatgccaatctgagtattctctacttggtcattggggggaaaaggtgagcgtggatatccctggactgacagacactactgtgccttagtgatttgggcagtgagctagcagaatccaaaagatttttcatctctccaaagaagatgatgtccaccaagacattgtgagaaagttcttaaacaaagaaagtaagcaagaagttcaggaccaaagcacccaagattcagcatcttgctactctgcatgttctatagcacaaacactgaagaaacagtgcactaagaaaaacaagggggaggctgctaaacttttggccaagaggatgaaggaagccaaagataaacatcaggaacagattgccaagagacgtaggctgttccttactgggtatggaaatggtatagctactgtgaaaaccaatatagagagatagtgacaaataaatgatcagatctcgaaaaaaatattatataccttgaatgtattcaagttttgtttttcatttaacctcagtaaagctagaaaagaaacaaaaataaatgatagggtttaattctgtcttttaacatcactgtttttattcaactccatctaactagaaaaccaaagcagaaaaggctgtaccaataaaaatatttttcaccatgtcttttgtgaacaaacaaaattttgttcttagatttaaagaacttggcagagtacatctttctggaacaaacacagttcctcattacaaagattgcatgccaaattttgcaaaaaaacaaaccttatggtgtacatagagttcataagaaagctcaggtggtgcccctgacaaacccaccctttgctcccccaaatacacataatttgtattttgtattggtgatgcttacatggttatgttcagctggatttgtggtaagtctgcaaagggctcaggtccttggtgcttcttttaaaacagaactcctggtcaaaacatatctgccccaatagttgataagggttcatttcagctctcactatgtaaaattctgtccaagggtttccagagagggaatggctggcatgtttgtgtctgtgttcctggtctttgcagagttagacgatttccatggcaaacatgtaattcgctcagcaggtaacatcatttcgctttctccaagacggtcctcattatacgatctgaaaggagtggatgcatattttatcagttttttttcatcaaatttcataagcatgccttttcaatcacagggtttccagaggggtcaagtattgtcaaacatgttttcctaaaattctattcaccaatatccctttaagtagatgttcttgttttaatttcagaaatcttgaagtgtagacatcattcactttatcagtatgcgccaagcagcagctgtatgcaagtcctggggtgaggagtacaacatccatgctttttctccaaagctcacaatccaggaagattatttttaacccatcagtcccaggttgagacatatgataccaaaatttcactaaatcaggaatagtagatgaatggcaaatggaaattaatgtgaggtaaattaaaaggtagaaatgactactgcattccgtatggggttgtaaagtggataagaaaaagaaaagagaagggttgctgtctttgattatacatgtacttattctctttgttagggttttgtttcggatttttttcactgtgtctaagtacctggtaaaaatatcataaaggaagatttatttgagtcatgacttcagaggtttcagttcattgtccccttacttcaaagcctgtagcaagggagacatcatgatggaaggccatgacaaaggagaggtgtttaccttttggcaaccacgaagcaaaaagagacagacagatatggggtatagagacaagatatagccttcaaagccatctctatagtgacataattctgccaactaaaccccactcctaatagttctttcagctctaatttcataaatggatggactatgttttcacaaccaatcactactcagtagtgttaagaagtagggaccaagacttaaatacttgagcctctgggtacatggaaagacattcagggattatcattttttaaaaaaatctgtactactgtttgaattggaaatgtcttctatgggcttgtatattgaatgcttatttcccagctggtagcaccatttttggaagaatgtggaacccgtaggaaatgggatctagctagtagacatggatcacagaaagcaaacttttgtagctattatccaggtccctgatttcatccttgctctctagttcctggagttttgtgatacaaatagccttttcctctcactctatgtatgaactcctgtcatgatggactaataccctctgaaactgtgagtcaaaatcaatttcccttcccttaagttgggagtagtgtttcaggcacagtgatggaaaaatatctaacattgcctgtgtctccgaatcaatggcctaccataaatctataagcttttttttaacaatgaagatgtatagtttctgaggaacagagaccaggggtatgcatttgccaagtcatgtatgtacccacacacatataaagacaggaaaaccttatctgtcacatatcttagttgagggggtgggggaggacaggtaggagaagggaactgggattgtcatgtataacaatcctgtttctaattcaaataaaaaagttgaaaaaaaagacaggaaaacattacataaaaatgtaatataaatgttttaaaaccacagagagtaaaactataaagatttggcactagattaaatgaagagacaaaaaataaagaatttgaaactaatattccacttgtaaacctagttgaataggaaagtcaatttccctttatgtaaatcttgaaatgtcaaacatgccattatcaaaactgtaaagttctctggattcagtccccagtgctaaaaaaaaaaaaaaaaaaaaaaaaaaacaagaacaannnnnnnnnnnnnnnnnnnnnnnnnnnnnnnnnnnnnnnnnnnnnnnnnnnnnnnnnnnnnnnnnnnnnnnnnnnnnnnnnnnnnnnnnnnnnnnnnnnnnnnnnnnnncacacctggactgaaacttgagcttgtaacactttattatatgaatatgaagctaaccaacatattcaatagcagagagaacaatacaccgtaacacttttcaatcatcactcttcttaaaagtttacagaaaactctggatatgagctgtggaggcagcacagtagacctgtatttgattccaagtaccaaaagtggggtacatttgtgcatatttgtagatatatacagattaagtatccatggtttctgaagggtctgattataaaaacttattcaatatcctgtgccctctactctgatacaaagagagttacttaagatatgctttctgaaagcttggatgccatttaagtgagcctattaatgagttattataatacctcaagactagagtactaaggaaatagggtattgagtgagtacagcaggatcacaaatgtctggaacatgaaaagtttcccatggagcataggtcataaatgaagtcggccttacctgtctgaaaatactggaaatttagatatgtgttgaagttgtaggaacttggaagagaaaaatctaacaaagaaaaatgtgttcattatacacggggtcttcatttactcagtcagcatggatgttctattacatacaaataccatagtaggcaatgtcttttttctagaattaattagtattctaatgttctattaatacataaacagtcttcacttttgtaaaacttagtctaatggaggccacagatatcatccttatgataaaaaaatagctctttaccaagaaattattaaaagaaaaacaaaaaaggaaatgacatagccaaatgcccagtgctggaaattagcaaagacctgtatttgtaccctaaatcatggcagaatgatcagaaatggaaatcctaaaagtgactaatgaacagggaattatatgatgatatccaagattcaggcaggaaaaaagatagaatctcagagtattttaagctgtgttttcctgatgtctaagaatgttgaacatttctttaagagtttgtcagtcatttgagaatcctctattgaaaattctctgtttagatctgcaccatatttttaattggattatttggtttgttgatgtctagtttcttgagttcttcatatattttggatattagccctctatcagatgtggaattggtgaaaatctttttctattcggtaggctgctcttttgtactattggcagtttccattgccttgcaggataattttagtttcacaaggtcccatttattagttgttgatcttagtgtctgtgctattggtgcctaggaagttatctcctgtaccaatgattcaaggctgttctctactttatcttctgttaggttcagtgtatctctggttttattttgaggtctttgatctacttgtattcaaatttcatgtagggtcataaatatctttctgtttgtatacttctacatgcaaacatccagttagaccagcaccatttgttgaagatgctttttttcccattgtttatttctgtatgaagccatattttaacacaaaactcatttatggtcaaatatgcctctcacacacagcataaagatagttgcacttttaaatatatgtacttattatttatttctgtgtgcatgtgtgttatgcttgcaagtatgtgtgttcaccacatatatatctgctgctcacagaggccagaagagggtgttggatcccctagaacagagttaaagatggttgttagcaactacgtgggtcctctgaaagagcagttagtgctcttaaccactgagctatctctccagtccaattgcactgtttttaaggtacaagcattttactatgatctacaatatgaagtctagcagcattttccaccttgggtggcatatttctttcacagcattttttattttggagtacttcagattttggattagggtcaaattttgtcatatctgaataagtgcatgtgaagtaagtcaggtggcttttgtagttgaggtaaaatgatggctttatattagagtgatatgatgaggatggagagaatttgattctgcagagtctgcgtactgaacaagtttgaagcaatccactgagattgaaaatttgagcctcactgcacatgtttcctggtcattgagctgttcagaaaatggctgaagctctggtacattctgaaggccatattgtaaatggccaaatcaggccttgggcataaaattatgcacaatatgtgtttagagaataatggtcactgaacatttctatattatttatttctaattctgtattactatctctatatagagatacctctatatagatatacattgatacatctatataaatgtagatatagatatggttggtcaaatatgatcttagccccagttaatcagcacaaactattggcttcaaatttggcaaaaaaacacaagcatacaacaaaatagcctctagtataccaagaaataaatatcatttcaatatggaccatccacccaatgactagattctaaatattgaagagctgctattgaacctagcacttggcaaaactgccaagggcaaagcaccacatgggtatgctgaggagtcagagtttgacagagtaatttcaaagcattggaatgggaaagtgaggaaagtcaattgtcttaggtgtaaataaaggaagcttaatgattccttctcctaaatcgaagagtctgctgattttttttcatgatttgctttcttcaatggtgtttttttatcctcttattttcagatttgtataagataatcattgatacagaaaagccctctaacattagggtggctgaataagaatctaaatatgttagcttacaagtgctttactgtccagagctgaggatggaatttgacatgtaagagtgctctaccactcagtatgtagcagtttatctcatgtatcttagtgggcagacatagtcccagtggtctggtcacctacctctaccctcattctatcatacctggtaccttggatcacctcccttatagtctacagcttaccttgtggatccacatctagctgcttgtctttcatttctatccttgcacaagtcctgccagcctcctgttcagcaactttcatctttatcagtgaccatgcctggctttaaagcaagtttctcaccatcactgtggtccttcatgacacatcattggaaattctcggaaaaatattctggatctgtaataataaatcagtgtcagcattacttgagggagggaacttcttataaatggaagcttgttgatctggtttgtgtgagattctctgggggtgggtccaaggagtatgtaattattgaagaatccccaaaggtgttttgatgacagtagatttatttcttgggatctctggaaactatttatctttgtgctactagagttttcagattctcagcaaatgagcaacaggtcaacatattatccctcatgttccatgcaggaaagaatttactatttcctaaagcatggcattgaattgaagtaatactaccacccacattgttgtgggggttttataattttccactcacaatggaaactataatctgttgaccatttagtacatgttagacaccaagaacagatttttactattttaaaatttaacccccaaactctcatgaacacttacattaagaacaggagaaaagcaacaaaagagttaagcaacttgtgttggaagaagtttctgtcacacagcagctcccaaataaacacactgagacttagtattaattacaaatgttcatccagtagctcagggttgttactacccaacctttacatttatgttaacacatatttcttatctattctttgccacgtgtcttggtacctttcctcagtgtggcatgcccatcttgcttttctctgcatctgctaacaactcctcttacactgtccttcttctttacatcattctcagtttggctttcccacctaactttatcctgttcagctactggccaatcagcttctttattaaaccaatcatagtgacatatattcagagtgtaaaggaatattccacaacatttccctttttttgtttaattaaaaaggaaggttttaactttaatatagtaaaattatatacaacaaaaccagttaccaagtaagaatcacagttacaatatctagtctatttgtatttggtaaaattagagaaaatattttatctatttttttctttgtgattgtaaagttttatacttattttaccttttatcattactaagtaaaactttacttctaattgtttagtctttaactccaacaaagaccacagaagggtgaaattttacctaatggcaagatcatctggatgcctggacactcacccaatgttttctgaaacactgaggcatctaactttggcttacaagcctagtatatctgacagacttttctgagaagcaaggaatttgacggactgtcttaccttgccttggcaatctggcagtcactttcttttgtatcatgctgttccagtttggacagtatactgtcagcaattcaggcaaggcagtttctttgcccacatgactagtttttgccataaataaagaaaactccatatggaggttctttgatgcccatcatcttttctgaagtagattggtgctgccaagagcagatatgtcttgctatcataaaaagtcttaggttattaaatatattaaatgtcacattctatagttctttgatgtgtttgaaggccacctatctatctaaatatatctgtgtatgggcatgaaaacatacgtaacatgactataagtttacctattatggatgaatattaatctgtatttcttaattatacattacattttaaatgagctgcataagcacaataccccagacaagagtagaaacatacagtataacaaattaactctaaattttcatcaataaaccaaaatccataccaatgtaatatatttaagattaatagttgcttttagattaaagtagattcaataatgtatcctctaatctcatcatttctatatcacccttttttcgtttagaaagaaatctttgaatttaactcctttgtttagctttttttttgccatgaccaataacaacttgtaaccaaccccccttaaatgataataaacacccataacctatcttttgtgaatgtgggcattattttctagactactactattgtttggagtcattggaatctttgggggaccctgaaaaaattcgtgagtatggtcaagtcctgactggaatattctgtgaggttggattaactcagccttgaagctgttctggatgctggatcacctgggccatctgtttttattgatggctggtctgattgttctgaaaatatataaactcttaaaggtaacatatgtatcttcattaatacaaatatagactctgcattgtataaaaggcagccaaagatgaacttttgttttatgtttgaacaggtaaaatatacattatatgtgttgtagttcttttaggtttctttctgtttgtagccaggattttcaggggatcttccttgatcaaacctgatcatctgtaactttgaatgaatacacagcctttcatttccagtggaaataaaagcaaaacctgttcttcaaagtaacatatcttttgacttccattttgaagtcatggcattttaaaaatatatagcttggtttaatccagcagcttttataatcaaatgtctcttagaagctattgctttttccttagcagtcaaaaaaattctctctctctctctctctctctctctctctctctctctctctggttttttgagacagggtcaaaaaattctaagacaacacaataacatacaatatccagactccctgtgtattttccatctttacatggctttttaaagtattactttacttccttttaaggactttagtattttaaaactgaattttttagatctatgactgtatatactttccctcttttctcttccaaggctatgtatatttttaagcatactataacccatttagaggactttttggtctggatctgtttgactaagcatctgccttgttttttgatcacatgagatgattcttaaacttatgtgtcagccgccaatagtgtagcttagcttagtgtattgtggtattgcatggtggctggcttttcctgtagacagcagctaggagacatgactctgaccatggccagcatgagagataatgagtataggaagttgcctgactccatttctatgtgtcctttcccaatctctctcaggttttatgtggatgtagttgccaaatgtttggacagcagtggttcttaacctgtgggttgtgaccctctatgctaaaggactctttcacatgggtcacctaagaccataggagaacatagatgtttacattgctatccgtaatcgcagcaaaattacaattatgaaatagcaacaaagattatattatggttgggggtcgccagagcatgaggaactgtattaaaaaatcacagcattaggaaggttgacaaccactgcccagggggcagtttcaaaccctggtctcctggttgcaaaattcccccacttaggaatttggccagcatctgattctaaacgagaggcacaactgagagtccagcacaggtctcccacccctgctggcttcttttgaggtttgctgtaagatgttcctcagcactggctggccaccttgtgtgcgatgactctgacaagatccacacgagctgcccaccatgaaagattcaatctctctggcgaatctcatgaaaatgactgtggtaacaaacctgaggcaataatcctaagtgtttttatatccctgctgctttcaggttgtttcagcattacagttctagctaaagtctccatttcttctattttgctgtgatgccgtgactcacagtgaaaatcccacagcagactagagagtgtcagtactgcaggtgaatctgctggcagcagtacaggtcccttgatgccattgtcttcctgaccattgtaactcctgcagtctcctccccatctgtaagcagtatgctctgctcactggcacagcaagatgcttttgttcaggctcagaaggagtggaataaacacaaaaaaggcagcctctactacatcgttgttaaactgctgtaatcacggtaaagtgttctggctacttacgtgaagttgatgtctctgtggcagagcttaagaagtggacaggaaacaaaggcttgggttgtttttttttttttttgctgttgtttgtttgttttattttttaacagttgggatgcccgtagagttattaatctttgtatcctatgtttcatttctatctattccccgggaacctttagcatactgactttgatcctactattcaaagggaacgtgtaaggtgggacagtttaaaaatcctattgtaatacactactaattgttctgatcatccaacagagttaaaatgtaatccttgtgaatcctcttgtttgtaaatgcagagaccattttagagccagaagatatagggtgttggaactaaagacttaatgtctgcatttccgattgccttcctcacgtgcatacagcccacttcatttttatattgtactgcacagtactcccattctttacttagtaaagcacatagtaaatgctcacctcgcaacacaatttactactgcagaaatcaaagtgtggctcattgcttcctgaataataacatattagtataagggagaaaagaatgatgtgaacaatgaaggttgtccattcagcctcagaagagctccgtgcagatgttaggagcccctctttgccacctgctggaatgccttttcaatgcagtgtgcataggcaagggggtatgggaatagtctgccactgacactgagatgacaaatcggatataaatgagttttctttgttgatttttcccaagagattattttttattatttcaaattagaaacaaacctgcttcacatgtcaatcccttctccctccctctccccccaactcgccatcaaccccccaccatatccccctctgctccccaggaagggtaggaccctccatgggggttccccaaagtctgtcctatcatcctgggcagggcctaggccctcccccatgtgtccaggctgagagagcatgcctccatgtgggatgggctcccaaagtcccttcttacgccatggataaatactgatccactaccaggggccccatagagtgccgaggtctcctcattgacatccatgttcaggggtctggatcagtcctgtgctggcctcccagacatcagtctgaggttcatgtgctcccccttgctcagatcagctgtttctgtggggttcaccagcctcatcatgaccgctttgctcttcactcctccctctccgcaactgggttccagaattcaattcagtgtttagctctgcgtatttgcctctgcttccatcagccactggatgaggggtataggatggcatttaaggcagtcatcagtttcattagaggggaagtgcatttagggtagcctcttgtcattgcctagattgtcagttggtgtcacccttgtagatctctggaaatctccctcgtgccagatcgctactcgaacctataatggctccctctgttatggtatctctcatcctgctctcctctattcttcccccgactcaaccttcctgctcctccatttcctccccttgcctcctcttctccccctctcattctcctagctctctctcccctacacttttctttgtcacatctagagacaaaagcatagatacgcttgtgagagagtccaggtgcagaggttgatgcattcaaggttatttctacccacccacagtgaagcagcaagggaaaacatacttccctctggcttcatccctctcaagacacacaggtctctagttgtctgcctcctgtcatctctgtgtacatttggacattatcttacaaaacaagtcaagtttggaaagacaaggtttacaaaggcagctctgactttcattttgtcccaaatatgaaaagcaattatctcaaagggttttttttttcctatgtcttcagagttaagcaagaatcatgtcatgaccagattatggaagtttctggacactctgtctacccttctagatgtttctttctttctttctttctttctttctttcttgcttccttgctttcttgctttttctttacttttcttctcctctctgcttccttggatatccataagaaagtagaagattgaaggttatgtggagaatcccatccaccaaactcaagggcagactaagcctacaatgctgacagcctctgttgaggaaggcagtgttctcagcacattacttaacttgaaaaactcctattttgacaactcgggtatttttatattattttttagtcattcctaggcctattgggataaaaatgatcttagtataatgaccacagaacaactccaaaggccagttttttcatcattattattatttcaagttgacatcatcggcaattatgccacacccccatacaaggatacaaggtagactatgtgtccctacagtgaactgtgcttaaaagtgtctatcctcccaagatgaatcagtacttcctagaagcattagcttaattggctctcaacttattcttccggagggaaaacatgggatgctactattaaaatccatgtttcgtcagtgggtatccatcaggagaggtactattatgtaattctgtgagaataactttctattattgattgcccacatgtcagataaaacatcattttctctaccatctgcttggaaatctctgacaggagaaaatgaatctgactaggcaaacattttcctcatgtctttggatagaatcagaccttttgtttggtgtttttgccccctttctccccaggttttcacctaacataatggctatttaaaaagacgaatgcagggtcgggggacccaaatcagcaactgggatgaagaaaccgttaaaagaatgctacactgcatttccataagatagagtgttaatcaaagcacaatattgcattatcactagcaaggaaatttgccctcaaaactggactcatcctttgttttcactcccaactctttttcctgccacctcccctatttttccccttctgctggctgtttggagcctcagtaaatcacgttgtgaaataagatgagtctgaatagcaaaagcatggagatttcacattccacagcataacaatgaactgccttatgttagaattcaagcttgttagtaaggctcacaaatattatcatctcctgccgtggcaatttactacccatcccaggaaagtggtttttcctagcagagccaacatgaaccatgcctcgcgagccgcagatgggatctcttcactgcagtttttgcgttctgcactgcacggagcccaattcatacttggaagcaaatgtgtcagcttctgtgacagatcacatggagacatcgtgttaatcacacgatgggaaaggtgcctcaaaggggaatttcttgtggagaggcaagtctgttctaagcaaaaggaccaatgcccaggcccaagcctgcagggcgtctcaagagaatgtgggtgccgcagtgcagtgtctgagcatgagagggaggtctgctggaggtgtttgtgcttgctgatctttattgaacaacacatttatccagtagccagagcagcccgtgctccccccaacctatgctttaataaaactctcagagttcaagggtaggacttggagttcacatggtaaatttagtaactagaaaaggttgagaagatggtggcaaattcattttgagaaaaccagacaaagcaatcgtggtctttgagagccatccatctctccctcccccatctctgctttctaccaagaggggctcagagcctttgaaaaagccagggaataaatatagtgccccacttcctgagaaatgcagaggagcaatccaagtgagcatttccttggggggggggcgtaaatgatccatgcttggagtgaaatggtaaagaatttgtttttctttattgtcatattaaagatcctgagccaattcgtgttagcaatctgaagacagagaaaaggtgaacacaaagacagtaagactttctgttcatctgattagaattaaattttcaacctctgaaagcctaagacgtagcacacttcgaatccttactgagggctaattgctatgcctagttaggagttagctgaagaaacctgtcttaaaattgacagagagatcagaggagagataatatgctgatgagaaaagcgtttgcattttccctaactcaaaaatagttttctaatagaggttttgacagggaaagttatcctttacaggtctctggaatagaaagagatgctttgatttctaatcctggagtctgacctgcaatgtatatcaactgtagattctttctcttgaaggcctgaaactaaggtcacatagaaataaaagcatatcgctgatatatatatatttttcatttttgtggaaaacttgaatgactacctatagtagcgatgggaacaatgcctttttttatttaaggagaaagaaagtttctcgaatatctctaatagaataaggcataaagggtcctgttggagcaggagtttctctcacctatctgcttaccacaggaatatcagcaaagggctgtgagcatcattctgtggtcccatgggggagagatgaggaagagttttggggactgacttgcttctaggaaatgaaggacaaagactctgagttttcagacatgctaaagtcttttttcttcatgccttcaagggctagcaatcaaaatgtttaccactcgtgcagagccactcatctcaacagcaaaactttgcctcaagtcttttatggatattgatattatcctatgtttctccttgtatcttaagccagtctcaaatgaattgtctggccaagactaactaccttcattatctatctcccaggcttctacctattacaataccctacattacctttccactcctaggatttcaggtatctagccacctgcatgcaacagaatccaaagtgatgcttttgatctagctcaaattccaatgcacatctgacacttgttgtttaaacatactatttctttcatttcccttacactgccttttactgatttttgttatctgacaactacttagacttttttttgcaagatttgtgcctcagtctggccttaagtgaggtgtttttaaaaggtatataagtcataagctttttcactcttcatgtccctcttaagctaggtcacatacatgcctaaaaaactgagcttcatccttgacttccttcttgtgattcaatcttgtatgtcaatccaagtgatatctctaaaccagaatatctaaatgaagccttccaccttaattttgaagacatcttccttctttaacctgctacttctcttttgttccctactgttataaatgacatcaccaatcagtacagagtggcaactctgactctgattctttagccccaccccatgtaaattgttacatagtaattcactcccaatataaacattctgttcttgagagtgtctcctaaagactctggatctaatcaagtcttaagactcaggaacagcttacagggctcagaaagctccccaaacttacaacaatatggagtgctggggaaatcagattctctgacccattgacttgccttcaagtcatccaaggagcatcagggatgcatctttcctgagtcattacccatgcttgtggacttttcaacaatttggttgtctgtacttaatcctacacacacacacacacacacacacacacacacacacacacacacacacacacacacacacctgtaagtaattccaatacaattattgattcacaaggttggactttggaggaattattactttggttcttctttattttcctacctgtggtaatgtttgttcatgtatctccagcaaaattcactctaatactaaataattttttgagataaggtctcacataaatcaggatggcttaaaactcacttcctatgactttgaatatctgatcttctggcctccaactctcaagtggtagaattataggcatatgatatgttccaggttgatttggtgctagggacaaaactgaggtctttgtacatgtgaggcaagcactctatcatctttactatgtccccattccctacattcagtcaattctatctctctgatcttcacaattctctcatatcacctggtctatagcaacaacagccatatcactgttgtcctcttacctcttctccttgtcaggacagttctcctgaactatattcaaagtagactttccctaatgaagtcactcttgtttccatcctgcatgcaattgtatgttatctcatggcaaggcctaaactttttgaagtcaatgcattattaattacttttgtatagctgtagcataaataccagcaagaacaacaatgaaaagctgtaatttgactacagtttcagaaggttcaattcaaaattgctcatccactgagcaaaggggtcaagaccaggctggagaaacccatagaaacagctgacctgaacaaggggttaggggtcaagaccaggctggagaaacccatagaaacagctgatctgaacaaggggttgctcatgtaccccagactgatagctgggaaactagcatagaactattccagaacccctgaaggaggaagtcaatgtggagatctggacaatctatggggccactggtactagatcaatattaacctctagtgcacaaatgaattttgggagccttctcctcatagagggataccctcacagcctagacacattgggaagggtctaagccctgctccaaatgatatgacagactttgaagatcccccaagaaagcctcatcctccctgggggagcagaaaagggttggaatagggggacagaggaggaggggagggagagggaactgagattgacatttaaaagaagcttgtttctaatttaaagaaaaaagggggaaaaaagaaaagaaaaaataaaatcataaacaaaaaaaatgctcatccccatgtgttgagcagaatatcatggccactggaacactggaatgtgtagagaaggaagctgtttacctcatggcagccaaattggaatgagagagaggaaatacaggaagagaccatggcaaattattggtcctaatggcatgtttcagtgatgtcctctttccaactagatactacttcctagctttctccacctttcccaataaattatattatgaatcaataggaagattaatccattcagttcaacataaccctcaggaactaattgtccatggaacctttatcattgacacaactaaagatgaacatatgtcatctcataggtgcttctcaatataattaagctggcattttgttttattgatatatgtatttttttattttttctctctttttatgctacatgccatttgtgtgtgtgtgtgtgtgtgtatgtgtgtgtgtgtgtgtgtgtttgtatatataatatatatggtatgtattatgacttgtgtcttagtatttttatgggattcctgagtgtgtaaacaagtgggtatctgcataaatatctgtttcttattcctcttcttgggctcttttccttctgtttgtttgttttgtcatattctgttgtgtgttagggtccataataagtcctcataaaagacaaccagtcacataagcaatcagcaaaggcgctttatttaatgttccaacatgttgaggtggcacatggcaaccacaagagaagcctgaagttcttttaaactgggttaggggaattccagggaggagagattaatctcaaggatgattggtgggtggctctagtggttagggacttttcagtggcaggatagagaaagctatctttagctatcaggagactgtggtcatctgctgaggcagcagaaggctgtggtcatttgttgatctctcagaaggcaaagggggccctgttgattggttgcccctacgttgtggttttccctgagaactgttttctcagctccagccacctccagtaaactgaaactaaggcctcggccctgacgggggctattagaaacctctcatggttctgttctgggtccctggcccactcaatgtgttagattttgttctatctattttatattatattttattattgcctcttagaagcctgtttattttctaatgagagacagaaagggggggtagatctcaatgtgaaaaggatgtggggaggaactgggaggagtagaggtaggggaaacattatgaactgtcatcaggatatatcatatgagaaaaaaatctattttcaataaaaggaaaaataagattagcactttgttacaaagttctccatcattttgatttttctgtctgaaccaatgtctctctgattattcctccttttatactccattccagattcccttgttaccgtcagctctgaagaactgccaatttctctcatttcccttgattttcatgcttgccaacttctgaaaacaattctaccctttcccatttttttcttgtagaaaatgccttcatgtttcctcttgttacttctttaaacaggatgttatgtttagctgcaaatctgcatactttcatgtaatacttatcatactttcaggtgtgtttttgcataactgtacacatgtgggtatatgtatacatatatgccgtaaatcaacaatgagtgatttctttagtcattatccaccttatgtgttgagatagggtctttaaaaattaacaatggtaccagttcaatggcttaaagattaaaaacacttgctactcctgcagaggacctgggattgattttcagcacccatacagtggtagctcacaaccatatgtaactcaagttctaggtgatctaatgctaccttctggctctgtgggtaccaggcacacaggtgcttatatatacatataagcaggcaaagacatacatacatattttcttcgtcagtattctattgctgtgaagagactccataaccatggcaacacttagaaaggaaaactgatgggggaagtccttctgtgtatatgcttgtcttactggctgataaataaagcactgttggccaataggaaagcaagatagatgggctaggagtctagaaatattcttggaaatgtagtaaagatggagtcaccatgtgatcgccagcaagagaggacacatacggctggcgtcctcaataagataagttcttacaaaatatataaattagtagttatggttgataattaagactgagctagcaagtaagaaatcctagtcattttccagcagcattgtacataatataagtctctctgtgttattttgggggccctaacattgtggcagaactcaggtggctggtggatttattgttatagaaaacatttaatttctgattgattacagtttcagagtttaattctttatcattatggcaagtagcatggcagcatacaggcaggcatggcattgaagaagtagctccgagttccacatgctggtccataggcagagagaggcaaagagactagcctggcatgggcttttgaaaccttgaagcccaccaatagtgacacatttccttcaaggttatgcctactaccagaaggccaaaccttctaatctttctaatcctttaaggggttccacaccctaatgactaagcattcaaatatatgaggctatggggccattcttattcaaaccaccacacacaacatgaaaataaataaatctaaaacaaaaacctagagctcaccaattcaatgagttccaggaatccacctttctcttccttcccagcactgggcttatagatgtgtactgccccatgtgcattttatgtgggtgctgaggatttgaactcaggttttcatgcttgcatgacaaacgtattaccatgacagcagcctcttcagtcacacttattacacttaagtaattgtttgttctacttaactataatctcagtgagggtaggaacctagtacatctttttcatcactttcttgcctgtaattagcacaatggcctaataaacatctagtgagagattgacttgttgaggaaagaattattgcaggaaagagacaagagtgagtactttacctttatttttaaagatttttttacaggcaattggaaatattagaagttattcaaagacttcatgatctctttaaaaggaatagctctaatccttagagaattgttgacccaaagatgtaggcctgctttagatgaggaatacaaaataactataatgactgatccttcaggatcctgaagggcatttgaaaatgctgtgaccatgtggctgaaaggctcttctccatgaacaagggcagcaggatgatgagttagttgatgaggctcatgaatggaagaaaagcgacctaaaaagcatccctgtactggggaaggaaggctgtcaggtttggtagtggcagggagagtgatcctgagcttaacagtgttcaaaaacaggaactgtggatgctaatgtcattgcagtcctaactgtaagctgctaggaaattttggaaattttctgaactgctttcactaatttagaatgacaaaaattgtgacaaggaaagaagagattctttgtgcttgagcttccattttgggcattcaaataaatacatatgaatatataaatatgtatatgctatatacatacatatagacatgtatatatactgtgtgagtgtgctcatgcttgtgcaagtgcatgggtctgatgtgtgcctgcatcagcctatgttgtgtggaggtcataggacaactttgtggagtcagttttctccttccactttaatgtgtattcatgaggacacctcaagtgtctttagctgctgaccaatgtcatcggcccacttatggccttcagttttgttgtcgttctattttgtttgtttgtttttttttgaggcatagtctctatacataacacaagaactcactatgcagaccaagcctcaaactcacagatatctgcctgcctccctctgcctccgtagtgctggtaccaaaggcatgtaccagcacacctgcctctcatggccttcttaattacattcacatgaccaaacagaacaatactttacactgcatcaagggatggggaaagatgatcaagtccttcactgttttttgtttgttttgtcctttgagctatgggggtgaggtatctgacagatatgagcactccattcccatcaagttttatgtctatagctccatacaaaatcttactttgtagcccatgctgctctcagattcctgattccctgcctcccaagagttgggattacaggcatgagctaccattcttagtttaataaagccctttcaaagaggagtttcctgacactcttccccaaacaaagtaagtcctttccagctgctttctttctaaactacaaatggaaaagagagacagaaaaaaaaggcccttgggttgcaaaatggatgccaaacggtaaagatagagaaaagaaatcaaagttggcacctgcatgtttctgactgagaaacatctttccctgtaatctgaagatatttgattttggagcaacaaagttctagagaattccaaatggcatattgagcatgtgtaatgccatattgtcttctgtacctttacagagacatgctgggctgtgttcctttgaatgctcacacatgtggtttttgaatgtgtgattcaaaaggaagaggaaaaagaaacagaagggagaagaccttgaggtaatattatgtatcgtaatgcaaaattgatctctttgtggagtgtgtcttccaggaagctggtgtgctccacagcatcacccaaagcagaagccaaatcacctacacttaatagttgtgcttataacaacaagaagatgaattcagataacaacaagaaaatgaaatgaggaggatatgttatactcctggagagtctgatcaagttcagagcgatgctttccttatttcttaataccttattagggttctcctttaattattaaatatattaatgttttatctgactacatttacaatgagaatcaatatttcccctgaaaacagcaatttgtaagacgcaaatgtcatgaagaaagagaaaatgtggtactcatttcctacccattcagactctccacagcatgagctacttttctgagaaagcatatggatattggatttttttggttcaccatgatcccttgtttaggcaacaataaacatcctactgtaagggcaagtttgattgtttcctttacaacctggattttatctcccttgctgtcatttttgtaccttctctgtcttcttagaatctctccttgccagtgtaactgtttgtgtttgtgtgtatgtcccctgatttttatttctttttccttccttttgtatcactctctctctgaccaactctgaagaaaccttggctttaaaatctgtacctaagtctttctgtgcctttagaggcctcttgtctgcagctgctatacatctatagttttactgtctttctctttggtgagtttcctctgtccctgccaggattgaaagctaacctaccttctatgtaatccttttcttgacacattgtccccactcttttgctcctttcatttatctctcttgtatttttggatgatgctatataatgaggagaaaggcatggctgtccagatcttctctcagggccagccttgtacattgtttaatatggttgaagtgcacaggaaggaatgcctgattaagtggtctctactcaggtacttttacactcataattccactgattgctgctgagatgaaaagaaaggtatgtttctctctgtctatggtttttaacagtggttataaaccaatggtccatgagccagaataataatttctcaggtaactttttggatagaagtacatcgttccctcgatacaccaatctgtgctccctgacattgcacttatatgttagaatgatacaccttaaactttcctatgcatcagaatccctagggatgcttgttaaaaatacaaatgcctggatcctactcaagaatcagacttggggagggggatgctggtatctgtatttctaacaagttccctagggcattcacaatgctcagtcaaagttgaaaatctatcattagggaagaatttctgtgggttaagcattgatctcctcctggacctcatttaaagcaaaaatacttctagaagagaatcatagtaagaaacgaatgtcttggtataaatgactttacgatgagggttcttatcggcatgaaggagagcaataaacatgtttagtatacactgtctacaaggctccatgcttccatagtgcatggttgttaggcaagcccccctttactatggttacatgaactatgttatgataataacaattgggaactctctgctcacatttactcattttttgcaccatgaatactatttctagaataaatactaggtacccaagtaaattcaacatttatatcaacaaaatcctggtaatataagtataccattaactctatccaagacctacttatactaagcattactcattgtttacctaaaattcatatttcacagtgttctatatttttgcatcttaaatctataaatcttattctcaggatgaatgaatgtcttcatagatccattgctccatgttttgcaattttagacctaagagggaattctgagcatgtttttctactttatagactcaaactccctctggtgaattgccccaaagacaagcaatggagaaaactactcaaactatttggctacacctcacccttatgcccttcagttcagtattgttggaagtaagggctgtagttttcttttcatttgcctgaagcctatagcttatttctcaggtggctttgaaattagatgcttgtcacctcacgaaccgcaatggttgccatgcctcctgtgatcctcactgcaactgtgaggtaggtgctgtaattcccatcttaccatcacgagcatggctggatattgaaatagggaccatggggagcaaaagcaagcttctcaacagattgtttagcctggaacatttgaagctgacatctcagtctgtgtttgatttagctattaaaatataccggccttaaacagtgagaagaacctctctccactaatagtgtctttttgcaatttaacaaaaggaaaaaacgaagtgttgtccttttactcactttctatgctttatgagtgcaccaataatgtcatattttaatcaacagcaaggccaatgacaaagataaaaggcagcatgcataaggagaaaaaagttcctcccctcaaacatcaattagaaacatttattagtggtattcagttggcagttcacatttatttccaggaaaatagaaggaaatctcttaaggctagaatggtttaaaggcagcaggtaggatgtagtgcttctgagtaattgctgaagacaagtgacctttggaatctagcatgagtcagttgcaggaagagaaagagaacataggtaaaagacctgttcaaaattcatctttagatttattcaacagtccttcatttttaatgcctgacagaaatattagctttccaaataaagtaacagaaagtaggaataagcagtagtcacttgaaaggtgattgggtgttgactctggaatgtggatttttttgtatttttatataattttctttttattttacataccaactccagttccccctccctccccttctcctgactaccacctcccccctctgcacccccacgtccactcctcagaggaggtaagttcttcaaaggggagtcaacaaagtctggcataccaagttgagacaggaccaagctcgtccccactgtatcaaggctgagcaaggtatcccaccacagggaatgggctccaaaaagccagttcatgcaaccagtataggtcctggtgaaactgccaggcccccctccaacagatcaagccaggtaactgttacccacattcagagagcctagttcagtcccatgcatgttccccagcagtcagtccatagtctctgagcttccactagctgacatgagacagtagaatgtgggtctttataagagtctagacctttgagtgagaaacctactatatgtattcagatgtttctatacatattagctaatcttgacactgtagcttgtgagatatacctcccctcacttatatagtatgaatacagcaaaaacacccaatgtcaggtctacccagctggagtcactaaagcaaggtatctgcagggttggctctgccaggttatttagctagtgctcaccagggcagaaaatatgttaactacactaatagttgtgggctacagttattgcttttatcttagacctattttctttcaggctgggcacgatccttgcatatttgtgtgctgtgttgtttccttactttgcctttcagattggatccctctgctttcaattttctcttgccagggtgaagcccaagattaatgtagctcctcagattttcaaggtttgtcttcagaggtaagtcctgtatacttgtcttccattaccattcaaatccccatcatcttgtagcaactcttggtttcgtacatattgaattatatgacaattcccccatacacaatcatttcctgaagggctctaacaggcccaagaatggcaaacctaagccttagcatggcagacatggtgacagacaggttttgctttttacccttcccctccttgataatccttaggttgcattccaaaagctagccaccaaagtatattcccttatttggccactgacccattcttgagattaatcacagaggtccaactatcaaagcatcaaggtcagtaatcaaaatccatcattttgactaacctaattaaaagaccaatcagaacataccaacacctcctagctcacactaacacagatctccccattgtccctctttaaaatgaacagttgcatagatattttgatgctgtttctgcctgattcaggttcaatcaccttgtctctttgtctggcttaataaaggatgtctttgtatttgatttgtgctcagaaactgactttgggtgtggtctgtgcctaatctggggtcccttcatttcctatttctggcttgttgataaacatcacaaacaacctttgctctttcctcttgcaatgtacagatattattccttaaaatatgaggacttagtatctcaaaggcaaaaatcccattcaccatacctcccttgttctagctagtatcacccccatgcaatgtcaacatttggtttgagggctgatcacatgtctccccacataaagattctcaccaacaaactggacaaccagagctcaatccccaggaccctcatagtggaagaagagaactgcctcccacaagttgttctctgccatctacagtatgctgtggcatgtgcagttacacacagacacacatcacacagtaaatacataataaatggagaagagcattctggtttaaggagatgggttagaccaccaacatgacatgtactcttacagtgagagagcatttttggtattctgtggtttcacatagaaataagaatatctttttggtcgtaggagatttttctgtatttctcaaatgtctcaaatgtctttgatgagttgcttttagccttcccacaggcttggggactataagccatagatttgctttacctttgtatatgtgtcctttgttttgagcatattcagaaatattgtctatatttcttaactagattacaatagccctagagattagtaatgtttataatgatctccagatcttgccctcgtgtgtgtgggggggtggcatttaagctttagcacaaacctaagcatatgaacttcatgttcaggactgtggatttcttatctatcttgtttgctgtaacatagtcagtgtatagcactctggaggctctctaatttgttgaatgaacaggtgaggctaagttctgttgttaatcacatgctttacacatgaaggaaacaaggcctagagatgtgtctaacagcatacaagtagtaacaaaagagtcatggctgagatttttaaaaatactttttatttaatcttgagaatttcatacatgtacatacctacccatcttccttctccaacttgttccaattatccttaaattcatgtccttttttcctatttataatcactaagtccaatcaatactgcccatattctatgggtacagggccatccactagagcatggaaaatctactagtggccacacatgcaaagaaagtgattcttgctgctctagcctctgccaatagctcctcagtaccagataaggtctggagagctgtaacatgaagtttcttggcccagctaggtcccattgccattctctgccccgaggaaacatatggatgctatattaggtataatattattgtgtgctagctaagctttcttatttgctagctcagtcttaattattcacccattttctaataattcatgtatttccacatggccttatattaccagaaataaggtccaggcctcttactctattgggagtcttcatcatgtctgtgcagtgtctcaacagagaagagaggcaagaggaaggaagagagcgatttcctgcttgtcgatgcttatattctgattctgcctgctatgtcacttcctgcctggatcacatggcaacttctatttattacatttcccagaattctccttgactccttgtcccacctgtcttgcttccctattggccaacattgttttattcatcaaccaataagggaaacataatgtacctaagacttcccccatcatctcctcttttctgtctaaataaaaataaggattttaactttaacacagtaaaatatataacaaagcagttattaagcaagaactacatatacaatatttagtccattaacatttagcaagattcaaagaaaatatcatctattctatctttgtgagtctaaagtcctatatgtaacttatcttttatcctaaggaaaactataaccatgactatctgttttcaactccaccaaagaccacaaaaggataatatataaactcttgaattgacagagacattttgctgcctagacagtcatccaaagttcctctgtaatgttggggcatccatcttcagcctctaggccataatgtgtctggcagacttctcagcaaagcaggaaatttgaaactgtcccacctctataggcagttagccagccatttttctctgtgtcctgcagaatgtctggaagactcctccatgaaacagtaacacttcaggaatttccatcttgttttgcaagttcagcagtcactttccggtggatcctgcatgtccagtttatcaaacagtccaggcaagagcagtttcttgcccaaatggctaatcttgccatgctgaaggcaaactccttattgagtttcttcaatgcccatccttctttctgatgtaactggtattgccaggagcagttgtgtctccctgtcataaaaactctaaaccatcttaaatgccatattctgtaggtctttcaaaggtttgaagaatatctacccacctcaaatacatctctttatatctaaaaaaactaactaacctaactctaagttttgactattatatgtgactgtctacaatctgtatttaattacacattacatttttaaaggagctatacaaacacaatacctaaacaagagaagaaacatacatataacaaaattgaccttaagtttgtatcaacaaatgaaaatccattccaatataaagtattcatttctatatcacaatcccttttttcctttaaaaagagatcaactgtgatcattaatcatttataattaaccatatataaatgaaaacaaacatttataaacaatatttgggaatgtggccatcgttctctctggtgatgaaataccatggggatcctaagaaaacccagaaatcctggctgtagtggtctgcaaggctgtcttgtccaagctgttggatcacctgggccactgcttcagggggtcttgcttcatcaaaccatattagtctgaaaggaatccacaacttttcattttctgtagaaacacaaataaaatctcttttccaaagtaacatatccttatacttagatcttgaaatcaaggcgtttttaaaatatataagttggattaatccagcagcatttcttttagcagttgctgctattttctcagcagtcaaacaattcaaagacagcataatagcatacagtatgcagactctctgtgtattttccatctttatatggcttatttatttattatcactctttttcttttcttttctttagggctacacagggtttctcggtgtaactttggctgcccttgaactcactgtgtacaccaggctggccttgaaatcactgagatctgcttgccaccacacccagctactctttctttctttccaattattttatcctatttcttttctttcacaagcctacgtgtatttttaaacacactgtaaaccttttagaggtttttcttcatctgaatctgtctttactttaaatctttatctttttctggccactcagtcttttacctgctaaacaatattgctaaaattaaagccatggctgttttagccactgtctttccaagatggtgggggtatgtttgtcaccaatactgagagctgtgctcaccacgttgatctatgttgtcatcaagcagcatgctgctgcttggagatgtagtcactgccactgccatctgctcttacacacgattcaattgttagcagggcctcttaaaagagccatgcagtttttccatttatgctgagtcaggaaacctcccttaaaggagcctagcaagtctttgcttgtctctagcaaaacatagcccacccaagaaaatgctgttaccaagaagctgtgcttgtctctattcctttgtttctaagatcccctttacagcttttgtcagatttacatggaaattcatgccacacgttgagggcaacattttgtaacgtgaggttttcttggcccggctaggtcccactgccattctctgccccaaggaaacacatggatgctatattagttataatactgttgtgcattagctaaggtttcttatttgctagctcaatcttaattattcacccattttctaataatccatgtatttccatgtggccttatattacctatgaccttctcagcctgggagttttggacaggcacaaaattcagtcttctggagcagtcctcaactccagtcagaactctgttagctgtcatgtaacagatatgacactattacaccaatgggcacatcttgcctggtcagcatgtggggtccagcactgatgccttttctccccacagcagcctgtagagcaccttctgcaactgtgaaaactaatgacaaagatttcttttgttttctttttcaagacaggtttctctgtgtaggcctggctgtcctgtaactcactttgtagaccaggcctcaaactcacagtgatctgcctgtctctgtctccccagggctggtattaaagatgtgccaccaccatgcccagctaatgactgagatttcaattattctcacacttgagtccttagctactatgctctgctctgccccacttcagtaaagtattctcattcagtgtgtactcaccatcttctcaaccatcactagagaatcctgattgagagctccaaaaatatgtctagttgtatgtgatggcttttgccaaattctggcttaaatagcaaagagcctgtctctgataacaaaacaaagcaaaacaaaacaaaacaaaacaaggaaacaaagcatgcttacaaaccctcatgatatcaaagggacaccttcatgaagatgatcatctctttgaggagatatctactaagtagctcttgggttaacgtacttgtatgtagttactctaggtcacagagtccgggagatgacaagtgacaatatgaagcaataaggcatagactgaaggaatgttcttattttagactttaaaataggacttaccagatcacagcacctgggtgtgcctacatttagggacatcaagagacacactcagcttttctgtttagcacatggtatgaagtcaggtactgtgatgaaacatcagatgtgacaggatgccatgcaggttttagtcagagggtgggacagagggtggtataatgtcaagtcaggaaacgtccctaccctttgatcttgagttttacttgcagagctaaggcaacttagagtgaaatcagttctataatatatgagctgtcacaaagactgtctgtgattaacttcccgatgagtacttaagtcaatgaaaggcatggaatgtctatgtgcactgagatggcttccttgccgagatgaatctcaggaagctcttgtaagagctgaagttaacctgtaagacccatgtgcccaagggcagataacttcctggaatgtgaagactgtggttcttgagaaataacaaagccacgtgtttttgctcccctaaacaagtctgtttgcactaaatatgcatgattggatgtgggtatgcttgattagacgtaagagggaagtacataagcaggaaatacatcagggcatatgcttgctcctgatcgcacatacagtagccccatggttttgcctttttaatcctctgcaaaatgtgaattgtggctatttcctgggaacccaggagtggtactggccatagcccatcctccttgccagtatttcattaaagcttgcttcagattcggctcaaagttgtgaaaccagaaaaactggtttttctcttgagctgtcacaaggcggtctgtgattaacttcctgatgttcagtcaacgaaaggcagggaacttccatatgaactgagaatgcttccctgcttagttgatatctcaggaagctctgtcgttgtctcctgataccctgcccattcttgtcaaaacaacattccaatagtgccttttgcaaacaggcttctggtagtcctttactgagaacagcagccttattctggggtgaagcaatgaagtaaccttcagctagtcccttttctggtttttattttctagttaggaaaaggactggcaaaggtacatcttccaaaatttgcatatccaatttgcccattacatattctaatccttagtctcttttctcaaccaattgaaacaaattccaggaattttcatttcaaaaataattaaaatgtgctttgcattttggaatatttatgcatgacatcagcttcaaaataattcaaaagaccttactggatgggatataaatgcacaaggttgacaatggatagttaattatagagacagagtgatcaatatcttggagctctttgcagtattctctcatttgtttatgtttgaattcttttgtaataaaaagtttaataaaactgaaaaccaaaatgtctccaaagtcccccaggtaatttagatgcagctcgtttgcaggctggcattagggagtctttagacaagattatctctaaaagcttttccagataaagcacactgtttctttatgaggaggatgagacttgaataggaccaatcaggacttgccatcttggccagggatatatgttagtttttctctggatgaatttagatgtagccatcaaaggtggaagcagaaacatgaaaaagaaatactgactgttattgtgcatagaactaaaccctagatgcaaagtgctggcaggagaaggtgataaatagaagcctttccaatcaagataaccagtcagcaagcagccaagaggctcctttggaacagctagtaatggcatcattcaaatcaaaacaaagactgatgatgttaataccttgtagctttcttctaagtgcatctatgctgttccatttgaagctcatatcttacccttggggtaaaaggaccaaaactggctaagttgttctaagagagggtggggggcatggcaggttttatcattctcattttacaagtgcggtcatagaggttcaaagaaattcagtcaagatttcttttaagccactttgattttctaggatagaagaaactaccaatatttcaaaagtcctggaacagatttcaccagttctgacacgatgatacactaactttttttttcagggttagaaggttttgagtttcaaaagccagaatcagggcatcaaatttctttgtttaatttaggcaaaatttcctttgtcctgggaaaataactgctagaaaagtggtgtcttatgaattatctcagaaagcaaaagaaaccatgaagttgtttcagaactgctaacagacatacattcaaaattttctgaatatacaaagtctatttaaaccttatttattctaaattatttgagaactgtttctcagttgaagtatcaagaattacctgtggtcttgggcacagatttccagggcttgggatgatggttttcacatgaaggttttcttcaactaatttctaagtgtgccatttttgtcaatcaaatactttaaccatttcacctagacattcccctgcaatttctataatcataagagacctttgtgcacacagtgtactcatagtgttgatacagccaatagcagtaaatctgaagaaataatagctcaactatgttaccatccatgcaaacgaaaacctggtctcaccccttggtgacttggcatgcatggcaggcagtaccctgactctgtatgcaggtgttaaggtacctttaagagacaagccccacccacttctgctctctgctgtttctctgaggaagcagccctctctgtctctgtctctatctctgcgtctctctctttctcttctcacttcctttcccttactcccttaccttcctccaataaactttccacataaggtctacctgatggtatatttgtttctcacctgccatgggattcaccaaaggtcctacccatgcagtgttcataacaaactatgaatgatatttttaaaattagttgatgagtaaagcttttgtgataggaaataaagttcaccatgcaaacatgatcaaactgggaatgaggagacctcagctcttagttcatcctttatttggtctatattcaagactagacttcaggcaaaattaaaaagttgatccatgtcttaattagactagtggtaagcttatatcttggttaatgagagtttatcattaaaaaatcagactatccaaatgtaaaacggaacttgcccattgctcaatgtgcaacagtaagctatcctatgtctttatcctgttctgcactgctataatgttattgaatattctgtctttgattaatgtgttggtgtttttaaatctgaagaaattcactaagaatgactatctgattagatagaattggtgtgtgtgagggggggagggagagagagagaatgtggaagttagttagatgactttaacgatgtatttccaggcatcatgcacattttttttttgatgggaagactttcagtggcctggaactcaccgagcaggctaagctccttagagaacaagttccaggcatcagtctgttcctgctttaccagcactgaggttataggcctgtgtgcctccaagctgtagggatcaaactcaggtcttcgtgcttataaaatgaacattttactgatttgagcaatctcccaagcctccactagatagaattattctaccagagcacttcataagccagtggtcagtttgtaaaatttgccttttgatccagtgtttatccaccattaactctggcagggtacctggcctaggtaataactcattaactgactttgctgattatctcattttagaagctatttatgcatacgtcatagttagcttcagcaatcagtcaatttgacacaaacctagagtcacctgaggagggagaaacaactgaacaattgtccagattacattgacctgttgctatgtctggaggcattttcttaatttctaattaatcttggagggtacaggctactgtgggttgtgctatccttagaccagtagtcctaaggtagctaagcaagccagaggtgctaagccaataatctgcactcttctagggttttgcttcagttcccatctctaggttcctgctttggcttccctcgatgatagattgcaagggaaaataaaccctttcctctcctaagttgtgtttggtcagagtgttttatcacagcagcagcaaacaagctagagcagcatatttcaatggagtttaaagaaaagatatagacaacaaagaattgtatctcgtgaatactttccaaacattttctaaatgaacttctagcaaacaggaccattgctttatattacaggtgaagcttaaaattatgtgtaaagcaaagcctgaatataaacaaagcaagacattttcattaagcttcttaatggtacagaccaggaggaatatgaccaagtgagcagagggtagggttgagattatttacaaagcatggcactttgacaggatatttcctttttcacatttttatattaaccccgattttgttagatgtttattccatttgccacctagacttgaaaaaggaaaaaatcagtgtgcacacaaaagcatgcccatttaaagaaccattatattaaaaggcttcatcaatcctaaagaatatcacctaggtcactcagatccatagatcctgctaacatcatctctgatatcaaagaatgtcactaatttcatgttgtagaggacagttgaaacagtcacaaatggaggtggggaggaatccaagtattagaatatttgcacaaaagaagtaatactgaaagcaatcacctttgattttcctatggcattcatttcctcagtatggtcacatggctagcatgtgatattaaaatgtttggacctagaaagttatttgagttgtcagcagtttagtagttaaggtttgcactgacaggagcattaccatgttatgctgtcatccacccagagtcacaggattgatgtagagattacctgtgtcgaagcctaagcaacctgttgttgtctccatctgagacattgaaaatcatcccccaggtcaagtgtcttgaatattttcatatctattatttagtggtgactggcaaactcagagacagggaattaatctattttaccttctggacatctatgtgcttgatctgaagttttcctggatattttggtggatctgctttacaatggtaactcagtccttatacagaattatgaagagcatctggtaccaagaaccagcacactggagttaaagagatggcctggcagtgaaaagcacttgcttcttttgcagatgacttgggttctgctccctttacctatatgctggctcacaaacacctgtaactccagcttcaggtcatcttgcacacttttcttgactccttgggctctgtatacatatggtacacatatccattcaggcaaaacaatcatacacataaaacaaatcatttttgttttttaagacagagtttctctgtgtagccctggctgtcctagaactctggagaccaggcttgcctaaaactcagagatgcacttgcctctgcctccccagtgctggggttaaaggcttgggaaagaacacagcatgtcacaccacactgacagcttatcaccaactacttttttgttatcacgtcttaattttacaacaaaggctgtaattacacacaataagaaaaagtggggtggataacttaaagtaaaattgttacatgtttaactgtggagacacttaatgttagcaaggtttgacaatattgcactgtaactcaaatgacttgaacaagaataccattattaccatctggtgtctgggtagcttctaggaaaatgctaattacctggtgtaaaacctaacagccagcatcatcatgttgtgcttattttatccccatcctgtagctgacagaactagcctaatgcctaaacaatattaaatattatatatttgatgtatcaaatattatttccttgaccagggtcttccttctagggatgttaatgcccatgctacaaacactcccatagggagttgggatgatattttctctggagaaaggtagaagaaaatttgaatcagtgtggtgtgtcctaagaaagagccaagcattcagtttgagcatttactgaacaagaatttattaagcattttctgtctactggccaatatgctaaatgctgatcacagagtgaacataagtaagtatggtttagattttcagggagcttcccgtcttgaagaaaaacagacttcacccaaacaataacataataataattagctaatcataaactgccagaaatatgctgaaggaaggaaccgtgattctctgagcaaaggaagctgatgtagagtaagatgtcagggaacgtctctgtgaagagacagttgagagaagatccaagtgatgtgtaaagaaaggttgccttagagtgtgaatgtacatgtggaatgaaaaagtataatgactctgggtatgaatcatccaacaaatggctcatgtgttcaatattggctctagcttgactgtagacagatacctctgaaatagtgaagccaaataaatctttcttccttctaagttgttctcttggatatttgtcataacaacaacaacaacaacaacaacaacaacaaaacctaacacaaaaaagaatgttgagaagaatatttgtatttgatgaaaaggtaaacacacagactctttgacaggaggaatggcattcaaattgtggaactaaaataaaacattagagtgataaagatgagactgaaaaatagacaaggctagtttctgataagccttctagactgtcatacagtatttggttgtttaaaaatcatgagacaataaaagcattgaaagattttgttcagtgacttagcagagtttttaaattttgtttttattttatgtgtatgtatgttctgtctgcatgttgtttgtatagccaccaccatgtgcctgtgtgttgccctgagagaccagaagagggaattgtatctcctggaactggagtaacaggcagttctgagctgccacgtgggtgnnnnnnnnnnnnnnnnnnnnnnnnnnnnnnnnnnnnnnnnnnnnnnnnnnnnnnnnnnnnnnnnnnnnnnnnnnnnnnnntggttctctgcaagaacagcaagtgttcttaatcacttaggtacctctccagggcagatttttatttttaaaagccacatatgtgtctatgaggaaaggggataactgagctccaagagtgtaattgaggagactagatagggggatatagaaatgattcaagtaaaagaaaatggtagctgaggtcctgatttgactaatcaaggaactttcagtcaatgaataaatcagcaaggaattacttggcacctatctcaaaatgcatggcttgctctactcattatcttgaagggagattcatcttcagcctcccacctttcttttggacagccttactgctccccaattatcaagcatcccaatataatggggatgcctttattaaaaatgttagcatttaaggaaataaggagaaagaattgactcaaagaattctaaatagctttttttaatagaagagtattcatcaatctatgatccaaaaaaaaggttaccattctgagagcccataggaatttaatggtgtaagaggccttatttttaaaaaatcaaatttctaggcctatcttaaatcagaatccaaatctgaaatcttgattagaatttggagcagagctcagtcaatggtaggcttaatcatctccttaggtgattctgctgaacattaacaactgaggaacaatgcttatgaggctaatttagagattggtgtttttatttactttttttgtttgtattttttttagaaacaagaaaatgaatgtaagaagaatggagagagaattccaggttgagagtggtcctgagaaaatgccaagaaagaagaattagccaatttatgctaaggaacaaggaagtggactgatttgtcgagtgggttgtggttggtcagaagtaatgtgaagtcacctctagaaggagaagacaaaagagaagctatagcatgctcagagagtggtcctgttatgcctagcctacatgaactaaagcagtttctatcatccctgaatcatgggggaggggatgtgaactacatttggattttccttctctcattcaatgactagaacatagcacacttagtcaactctatgagcatggacgcttgtctcccctttcctaaactcctgtgttgaaattctcatctttaaagtgatgattttaggaggttggaccttttggatttgattaggtcctgtgaggaaagcccttgtgatgcaggttagcctttctaaaaggaacacagcttgctcacctctgttaccatgtgaggaaatagcaagaaggcattctctatgaatcaagaaacagcctttcaccagacaatctgccagcagctttatattgaactgcttaacctttagaaccatgaataacaaatttcagttgtttataagccatcaagtgtatggtattttgcaatagaaacctgaatggactgagaaagtacagtaacaacagtcaactgtaatgagcttgtactatgtgccaagcactttgcaaaaatattttacatgcaaatccttacatcactgagaggcaagtgttatatattaattctttgtcaacaaagaaactctggaatagagaggctagaatatgtgactcagggtaacttagttttgaagtggccacgccagaattttaacaaaagtctgtctctagagatggcatgtttagttacagtgcaaagtcattcatatcaatgcatgcccacgagaattgacagactttagggaagcacacatacattcacttagagggagttgttatgtatgatggaggctaagtcctgtggattcaaaggcaatttaggtcctaataaggcttggcacagtcctgggtaaatatacaacctcaaacagagattcatcttccctggtgggttaaaaatggccaaagatggtaagcgggagatgttgagagcaatcatttgggagtctgtcagcaagtttgttggtgctaacacacacacacacacacacacacacacacacacacacacacacacacactcacacacacacactcacacacacacacacacacacacggagttttaatttcctgggattttgttataattgttttgtaatttatttgattttagtgctgaggcacaatctggaggccttatatgtgatatgccagctctggtccactgagcaacatcccggccctagtaatacgtctcttgatattttaaataagttttgacatattgaaaataaaaataagccgaggaggaggaagaagaagaggagaacagacagattaacatcataaaactaaacaaagccatttagttctctactgcagatagtttccaatgcaaggggtataatacaagataaacaatcaaccttatgaaggtaattttaaatttagatgtaaactgtaggctgtctagtggaactgatctgagctttattttgacctggcagcttcttctaagttactgaatcaacccacttgaggattgtcatgacagcagattagagtgtgaaaccagtccttttcagtagccgtagattcatagaagtcatgcattcagttctgagcaattactgtcagtttagacattcaggttgaaagaaggaagtgtataattaatcaagcagagacgtatagagccaaagaaggaaagattccatggtataatagaattgggggtggggagagaagggggctctagtcactttttcttaacactcttcatagttgggtgttaaagaattcaagaacttctaatttggacttttgctaaacaaagaggaaattatgcagaagcactgaagatgtcctcttctgacactacttaatcattcatgtgttcaacaagggtcacatcaggaactcttcgtggcacttgtggatgtggagattaatcaggtcgaagccctggcctcacagaagggcatagtgtagtgggatagatgaggaaacaacagtaaaagaaacttggtaagtaatataggaacagatttttatcccgaagggtctacatgtttgagaatgaggggaggaaagaaatcattcagaaaagcctataaatatgacatcacctcatgcaacagggaagagataagcatagagctttcttttttacagtagcgattttattttatgtgtttgcatgtctgttacatgtgtgtgccctgtcaacacaagaaaccacagagatcacaaaatggtgttatgcccgcatggaacaggagtttcccaggtgatttccaccattttcccaggtgattgccagctgccatatggttgctgggaaccaaacttatgtcttctgcaagagcagtaaccagtcttaagtgctgaaccatctctccagctcatgcactgatttcctctgatagaaaaatgttgacttctctgaggggtaagatgatacctattaaaacagggagtctgcattctgaatcgagtacgtgtgtgaataccagtgtccctttagaaggaacaaggagggggaaaggatggaaaaacaatcaaatgctcatgggaaaggagcatgggtttagaaagtctagaaatgcttttgaattgacatatgaagaagacctgtgagaacttgagagttgttacaattctatatggagttacgtggtaggagacatgaagaaaatcatcagtaaggttacagacctttggtaagaagtcaggcttcgggaaatgcagagcgactggggcatcaggaggccgctgctctccctgttcctcgctgccaccaaagtatacactgtgtctctatgctgaggagtaaaagaacaaagaatgccaactgccccgaatgccatctacagtcactgcagtattgaaagctgctgtccttgaggcatttgaaatgtagtaaaaagaaacagggcacgggagccggaaggctggcctttcaaatgctgtccattcataaagcaggcatgataacctctgtagacctcccagacttcttgtgaggctcagacaagatgctagatagaaaagcattttgtgaacacttagagcatatatgctgggatgtggactccctctgtcctacaaaccccctatggtaatcaaaagtcctcaaggataaatgaaataatcaatggaaaacactgagccgctctgaaggaatttagtgtatggaaataataataaatgtgattcacatctgctttttgctgataacgcctccctttaaagtctggacactaaaagagcatgacacatcatgccctctgctgtttgttgaaagccctctactgctgaaagaggactgcaccaccatgtttttgccaccaagtacttcgttttcaattcaaaattaatgttgtttctccttctcctcctcttctttaagttttctattcttcatgaccaaatctggagacagatatttacataaatgccatatgaatataatcatggttgtctttccatctcctgaggccatatagcaggcaataattgatcacgataaacaacaggtcacatctggccagagcccttcagaacacattgacattgaaattccgtatggagcagagcaccaaagatgaagtgcatagtttttctgaaggtgaaataatgggatgataactgtcagccacatatcttagcgagggctggattcttttaagagcaattccatgcttctgacggaaagcactgcactgtgactggcagccctatctatctatctatctatctatctatctatctatctatctatctatctatctatctatctatctatctaatgtattacttttaattactcatatttacatatccatcaccccattcccttaccctcccctcctcccatgttccccaaccaacccaccccaacccagtcctcgacttctctccagggacagagaggccccctaccaaggacattcaaagtctgtcatattgtttgggagagggtctagaccctccttgctgtatctgggctgcaatagtatccctccatagggaatgggctcccaaagtccatttgtgctctagggaaaaagactgttttgggctcctagctggtagccacattcagagggtttggtttggtccaatactatttccccagctttatgactagggtctccattctatctgtaggtcaggtccactgtttctgcaggtctctccattccagtcttggctcctttgctcaaacttcctccctctccacaactgaatttcagtagtatggttcagtgcttagctatgggtgtctgtttctgctttgaacagcaactggatgaagactctccttcctctccctgcccccggggctccaatttggtcaggggttcttttccccattcccttctttgagggactatgcaatcttctcttggggtcctccttgtttcctagctcctctggcagtgtggaatgtagggcagtgctatttgttgtccaatgactcaaccatgggttaccctcaatgtaaaacaagatgtgattcttcaaggagatgaaggacagttagcataaaggcaggtgggattgttcaggggtccagaatcaagaataattagtccctatcaccataaacatgtttttcctactctagaggctttctggtgaaacatggaggcaaggccccaagaaatctgtgtttgtgtgtatatgttctggtgcatgagtacatgtgtgtggaggttagaggtcagtttcttctgtcacttctctggtaccatctgcctttgttttatgagacaatgtctcttgacctgaatcttgctaattaggttaggattgctgtccagcaagcctaggggatctctgtttgtctctgcttccccaacactgttattacaacttttgtgttccaccatatctagcttggtactgggactcttacagtccacatgcttgtacaacaaaacactttaccagctaaagtatttccccacctcccaaagcagaggcatctttggaaatagcagccagaaagactgtctagaaccatgacctggaagtaggtgtggttgacttcttaaattgcaactaccctgcttctattttcagtcctgttctgcctgtctgagtcttcttccctgatgctgagtgccttctccaattagattctggtctggacaatttattagagctaaggaattaataggtgctaatggctctgcttgtaaaatgggctttctatcttcaagcaatggcaattagatgctgaaggtggagctaccttctggatctcacctcatctgtcatatggatagtatggtgacaggatggtactagaagacagaatttcactgtgattcaaagctgtgatatacgacacagtgataattttttttcttacctccgaccgggagaatgcagagagttagacagtacaattcaatatatcaggattaaaacaattgttgtgaattaacttaatcattgctttatatgccttcagagacaggtttttgtttttttttttaattctattgtcaccaacaaataaatgaaggtgggtaaatacagataaacttaatttttagaggattatctattctcaaaggtaccaaatctttaaattaaaagtgcccccactacataaaatcaaatacatgtattgcagtaatgtaagacacaaggagagcttgcctgaagtacaggaaggctaatgtgttgttattgtcattttgcccatgtatttcatattcaaaaaacagcaagatctctcagcatggcctcaccaactggagttacctgaggccgaagaacagggaacaactaaaaaattattttcttttattcgagccatggattttagacttctacgtccagagtgttacaccaagaaatcagtgagaagacaagatataagattgcaaagcaagcttcggtgtgcactcaaatcatgtgagtgttttttttttttttttgcttttttgaatatatgtttggaatattttatttacttagggtttttatgtctttgggtgttttgtctgtgtgtatgtagtgcccacaaaggccaagagcagctggttcccttaatccctctttctgccatctctctagcctaggggaatcattggcatcttctcctcctcctcctccttcgagaattctttacatacatattgcatttacatcatttattttccctccctttctctcccctctagctccttaggtatcttcaattccctctaaaatacctgagtaccttctaaattgcagattctggtgcgttccttggggatgatgcctgaaatatttcatttcaaaggaattcctaggtgctactactgttgctggatcagggagcatgccttgagtagcaaggactgttctagacagagtctattttaattttataaatttaggtgggtttaatttactttgtgtgcatgagtgtttgccttcatctctgtgaaccacttacatgcctggtgtcatggaagctagaagagagtgtctaatcacctggaactagagttacagagagttgtaagctgctatgtggaatctgtaaattcaattggggtcctgtgcaagagcagtgagcatgagtactcttaactgatgactcatgtctcagcccattgactcagagtttagaaagagagatgttgttggctagcaacaagaaatgttgaagaggctcagtaggaaagttgcacagtgttttctggaccaaataagaacaaaggaaaccaaaaggagacaaagataaggctattggtgctcatgattcagttcaaatatactagattgcaagtgacatgcaccagaaagagagcatcttttgcaagcttaggaagaaaataatggcttctggttaggatatgcatcctggaaaccatgctgcatgagttcaaatttcacctccaccacttcctaataacaccttgatcttgccttatcccctgaacctcagatgattcatctgtaaaatatgcataatagagcctagctgaggatgattgtaaggatgaaatgaaatgaagagtggaaagccttagaatagcccggccacatagagctcactaagtggtagctattgtaacacttccatctttgagttgatactgtttaagtactactgtgctttattgaagtgctagccagccatggtagtgctacactggtgtttgatctgaatctcaaagcagcctccattgtttgagacacatggaaagtcagtgtttggggatttaaataaatggaattctagacaaacgtattaaaaggggaagaaaagcttgcccccagaaactatacttgttttgtgctttgaccccatcactccctctgcctatagctcctctgacttgaatgaggaacaaatgattaaaaaatgaaactggattagagaaatcaactgctttctatctctgccaaaaggaaatgtcgaatctgggcaattatcattcagcctggggcatgccaggctcaggggaagagagaaggggagaagaaggcttagcgaaagatatttactagctcatgaagaatgtcctgtgcattactgagttgcatgcactgtcctccggtaagtaaaagcactcaataatacctcagtttcagggatctacagtctagaagagaaacattagagtaagacagacagtcagacacacacacacacacacacacacacacacacacaattatacacagtagcctgtaacaattctccagcgaaacctgttggttaaaacagtggatgtgtttcttgggagtagcaattattctggaaagaaaagttggtcttgactctaaaggtccttgaatgtgaaatgtgtgctgtgggcaattagaagttaatgatgtttgtgtgtgagtgggggtaccatatgcaaaagagaatttcaggaagattaatctggcaacagtttgagcaatttaatttaacaaccgtttactgagtattatgtatagcaccagagtccaagatatagagttctgcaaggatacagaaaaatagagggcacacatacataacctctctgaactgaaatccttctcagggagacagacataaatacaatgatctgaagcatgtaagaaaaagagaaaattcttgtgttccaggggaagtgatctctagggtagactgaaatgtacatttatggaataagagtgtgggggaaagtatatgttacacatttatgtaaaatttatctgcaaagttgcacaaaaatccaagtaacataaatcacctctaaggaagagcattgggaagtctgtggtagggggaataggagtgttgtgtgtattgccattggtaccctctttgagtttgaatctaaacaatacattattttactccaaacacttagaaattggagggggctgagagtatagctcagttggtacttatttcacaagcatgatgctctggattcaattcctagcacccatatgcaatggatattagagccatgaagggggaaatgatgaattctcattgagcaaatatggaaaggttctttggaacatgtgcatatgaagttaaatctctaagtgctgatatttccacaaacaatgatctgagtggaagtcatattaaacagtagacagagcttacctgaagccctaggggaggagctagacatctgccatccatcatcgtatgtcagctgcattcagttattgagcaagggaaatatggacagtgtatgtgtgtattgaaatttgcataattcatttctgtgcattatatttaacattgtagcatgtaaagcaaaaatactggtggccaattttggaatctctttttcattgatgtctctaaaaatccatattttatacttaaaacaaaggctgataagtttaccacttcattacatggactttatttcctcaatattaactttctacagtttctcacttttcatctggttctcttctactcatcctttaggtattccattaaacattacttcttcagacaggcctttcagaggtgcagatgtaatttggttggcagagtatttgcctaacatgcctaacctcagtgtttgaaccctcaggacaacagacacaaagtagcctctcatgagcacagtctagccaataccccttctcatcacacttatacaaacacttattcttttctccccaaggtgtgcacactctctccagacacttaaagtgattatagtaatataatgatttgtttaacattggcatgttgtatttgactcatgaagacatagaatatgcctccatttgctcagtgttatgcagtatttagtatgaaatctggagtagagtagacgtttagtgaatacatgtggactgaaaactggggagatacttagcctattgttaatgtgtcatggtacaagtctgaaatgtcccttacatgctcatgttgtgagagccttttttcccagctggtttgatggtgccattaggtcactagaggcaggctcttgaaagttttagcccaatcttaggttctggtcccactgtctctaatctggcctacagtgtgagaatgcctctatcacacacttccatttcgagaaattctctaccatggaaggcaacatctgaaattgtaagcccaaatgaatccttcctgctttaggtcatttctggatagtatgctatcacagagacattaaaagaacctagtataacatggtttgtgtgttatactaggttcaaacccagaacaaaggaaattatagcaattatgggcaagaagaaccctaaagtactttctgggtccaagaatgacccatgctttcctttcagaattctctttcaaggaatctatgaaagcagtagcagttctctaaaaccttaagaagaggtcaattttccaaagtacttttgtggcctgtcaggtatacatcctgtctgattccatggaagcctgcaaattgtgttactatgactcccctgagagaatagaacctgttgccttggaatgcttagtgacatagccattttctgagttactgatatttgggcatgaaaaggaaaaggatattgtgaggttcaggatggtccaaaccaggaaaatcaggtcaacttcacatcatttttatacacacattacctcacttaagatgtttctggaccgtattacaccaagctagcaataaagaatcccaaggctttccaaaaatggccagtttctcctcaacagggtcacacatacatccatatgcttaggtagatagaggagggtcgcaaggaaataattcttcttcaaataatgaaatctcttgtgtgcagaagctcacgagatgtcacaacttaaactgatatatacagtgagtcctgatggaaagtatcagtgaatagtgtcaatgactagtgaggtcgtttcctttctggaagtgctcattaatactgtgactctaatgctcctgccttgtgtgactttggaagccatagccaggctaggtttcactggcagtgagggatagagaaaacttacggggatatagtgtacttttaagaagtaaaataaatgtaataaaaagcaggcagcataattgtcatgacttataccccatgacatttgataataacaaggttggtacattgcaaataagttccacatttacaactctgccttggtatttacacttattaaattgtttagggaggtggttcctggatgctggaggcccatatataagacatattagcataattggagtacagccaaatccctcagtgtacattgcagacacttgttaaaagcttgaccttggaggaaacaacttcctacttgtcttcaatcagttagcaactgttgaagtcctctaaagtcaacgtgcagacatccagtttggggaggttgtcctcaacacagaccttacacaggtcctctgttcccaacacagtgatgaaggttatgttctcacctggctgaggaaattagctgcaattttctattacctggaccaaacattgcttttcatttgtttaattccctgagagttgacactacacattcattcattgagcaattgctttgtgtaaaggcccagagatgaatgagacagtcattgccatcaaggaacttacacttcagtcaaggacacagaaagccaagtatagtaggaggcagaatttaaaagaccataatagaggtgtgaacaaattgctgtgggagcattagataatgccatttattttaatggtgaaaggaaaattaggaaaggcttcaaaaggcagcattggcccttgaaggattaataggagaaaaatggtgaggttaggtagtgaggcaatactagtctgaataagctgcaggtctacattctgcatgagagtaacatgcatatctgagaatggtaatgtattcttgcattttcctggcatcctcccatagtaaatctgatgcagccttgttgtaaggatggagcctaatacttggaatccacatctgagtatgctcttgagaccttgaaggtcacactacttttcttaatagaaacactcaaatgttttcaaacagaaccaagactaggcaattgaggatgctatctctggtggtgtgaaggcgaatgaaacacagaggccaagctccatgcctggaagataccaggctgggagggaggacaacacaagatacactaggaatttctcatcctaaatttagaaagagaatgtctggctgggaaagaggtttcctgtggaaaaacatatttgcgggtatgttttagtgtatagtctccacttttcattcagtaaggaggtggtagtggggttctggaaagagttcacagcatcatctgcttgaaagtcatggacatgactaagacgaccctgggagtgaagagaacacaaatgaagaaaatttgggttaatacctatattcatggcccatgtgatagcaaccaccaataaaggggactaaagaatttttgcagtaataaggggagcctgggctaggtatgtgtgtgggagatcggaaataataagcagaatgaactttcagaggcatttataagctcatggtgtcctcaagtagccttgaagagattcacaagaaggttgctctttaataggatcctggaaactcaagacatttgaagactgagaagaaatgagatggtggaataatggatgtgaaaaatgaaagtcctttcaaaagtacaaaatgctgtacaatataaggtcacagcaagtcagctttttaccacagatgctgagaagtcaaaaagtcgctgacatctgtaagacactttcattttcatcactatactgaattctactaggggcacttagtacatgacctcttttatttcctctcttcattccctaaggaccaccagttgttcagccaggtaaaatacttcattacttgatttttgtcaaaaacttcaggctactgtgccaaggattcccaaagactattgaatgagaacttaccatctttaaatattttcaatttaagtttgtgatatttgtgatttagtaagaaaatgaaggggagtaacatgaaattttggagggaaaaaggtagagaagattgaaaaactacaatagttttagcttaaataaagctacgcagtgttatgtgactggggatataagcctcatagttcttaagagaaaaggctttaagcataaaaacacattggaagtctgaaattcttatgaaataccgaaacaggaagttttgctgtttgtttactactacttcatttttcttttcttttcacttttctttttttagacagggccttgtcttgcagcacagactgatcttgaacttggggtgatccacatgccttaatacccaaagagctgagattacagtcatgaagcattctggctgcctgctgctcctggagagagtagtaattgcttaagaagctcttaaatgtacagtttgaaatattaagcagacacttaagaagctctaactctgaactaattaaagtctttcccataaattatacttcatctaaatgcctttctttcctgttgctgtgagaccaaaagtaaaaaagcaggacatcttaatgtcatctcagtctttgctgggttcttacttctcttaagaactgttccatggtttggctttcagtattactaaaaagtgggcgaaaaaaaggtggccaagaaaaggaagtaacctgaagaagctagctttctttattactgtaaacaccagattactgtgtaagttgtgtggaaatcctgtccttttgtttgctttctctctccatgaactcatgatatatacacgaacccagtttgcatgagtgggctttgagagctcttatatgctcaaggcatgcccagggtgatcgttcacatcctgctgcctgtggatcaagatgtagaactctcagtaacatctgcctgcatgctgccatgcttcttgccatgaagataatggactaaacctctgaaagtaagccagccccaatgaaatgttttcctttacaaaagttgctgtagtcatggtatgtcttcacagcaatagaaagcccaactaatacaatatgtataccatcatctttggagaccaggcgatgtcagatttggaagaggtggagttacaggcagttgggaatctcccaatatatgtgttgggaaatgaactagggttctctgtaaaaacagtatgcactcttaactgttgagccatttctctagcacactccacataatttctttgtatataacgtttcggcatttccttataacttatagacttaaaccaaattaaagcaaagatcaagtactgacatattttacctggctgaacaactgggaaatgagggaaaatgaaagaggtcatgtactaaatgcccctagtagaattcagtacagtgatgaaaatgaaactgtcttacagatgtcagtgactttttgacttctcagcatgggtgtcttagatactctcctattgctgtgataaaacgctatgaccaaggaaacttatagaagaggttattttgtacttacggttccagacggttaggttctatgatggcagagtagagggagcatgtgacaagcagcaggagcaacagctgagagctttattatttttattcaaattttcatttattttacataacaatcaatttcacctccttcctctcttcctgttacctcccccgtgtcatgtctatctcccccctccatctactgctcctttgttctgaaaggggcaggcctccttgaatcacaaacaggaagcaaagcatgcattagggcttgtaggaggcgtttgaaacctcaaactcatcttcagtgacaaccattttccaacaaagccattcctccttatacttaccaaacagttccacaactggggaccaagtattgaaatgccaagactactggagggcatctcattcaaatcatcacaatgggtctttaattctagtcatattgaattctttaatattatccacatatgtacaaaaggtttcacatttgtaccattagccatgccttcgctttccctgctcaaaaagaattaagtgtcatgagaacagaggccatatagaccttacttgattcattgatatattcttagagattagccttatatgtggcaggcagtaggtattcaacttatattaagtaagtgtagaaagtcatcatacagctatatctagttaccttttaaattttagtttaaaattctatgtctttaaaatctttacattggtgcttgttttccactttactcttctaacagttaagaagtgatttttatttttttttttagtattttcacgggtcttctttatgccatggttaggacactgatcagtattttccagtttaaattacaattctttttctttttttgagacagggtttctctggattgctttggagcctgtcctggaactcactctgtagaccaggccggccttgaactcacagagatccacctgcctctgcctcccgagtgctgggattaaaggcgtgtaccaccaccgcctagctcttttcttttttcaagacttatttattttatcttacgtgtgtgccctcagaggccagaagagtgtgtcagattctgtagaacttgagttaaatatggttgtgagctaccatgtagtgctgagaaataaacccaatcctttacaaaagcaataattgctctaaactgctgatccattgctcctgttgctccaattatgtttctgatttctgtccccactaagactgagatcacgatggtatgagctgtattcaatttataactttgtcctcaaaaagtgacttccctgaatgggtacatactaactagaacagccacaccaggggcgctgaggaagctttagcaaaatgcaaactttgaggggtcaagccattcatttaaggattattatatctaataagttagtagcttgtatgctgtgcacataaacatcaaaaagtagaattattggctggacctcaatttaccaagataaagtaaaaatatcggtatctctattagtccagatataaggtcatcatgactatagactacacactggctaatctccaagaagtgggtacaaagttattgtttgtataatgtatgtatttgcaatttttctgcaatggacactaactataattatattttacttgtggctattgggatgctaaacatctaaatcaattctctgtgtaaatgggatctttggctatagcattcttttgttataaatcaaaactatatagcatattatgtgtggtatattcatcaatttccacctttctatttgtctttcaactcttggccttaagctcaaatacccccgttgtggatactctgggtttttgactccttatttgggtcatgggggagaaagataatgtatttgatttctggaacaaactatcccaaaggacacaatggtaggccaagattgggattgtatcattaacagatctgcataattactttgtccagtattttatattgacataccacccacaaggagggatcctttggaaagctctccagagaataaaaccctgccattcttcattacttgtcctggacatttacccctctggacatctgaagcccttttgctttagcattacacacaatgcacaaatatctctgcaaaaaacagtttgtgtggagcatggctttttagttgtataaacatttctctactattctgatgagcagaatgcatgaatgctaaggaaaaccttagagttctcgtaactatgcaagtctttgaagacagttcatgaaatctacttgacctgacccttgcaaaaacactcttgaagctctgtttagctaaagcttttcctacaatgtcctcacatcctcttgacacttcaccatccatgtcttttcattcatatttagtctgaatcatagacagtacaacatttaacgtaaatccaagctttattgaattagtaggcattatacagagactgcaagtcattattggtccagcacagatacaggtgtttattccgaggtgaaatgagaggacaaattgacagttcttctattacttgaactatttctttaaggtggcttgttatggacactatctccctcaatacccattcaacacagtctttgctttcaactttcccttcagcagagggatttccaatgtctaaaggaagcttgtaaagaacccttctgtaccagaggtagttttgtgcctgcattatgcatcacagaagacatctaaacaaagactccataaaaagggcagaagagagagatatactagagcagagttgagatccgtgaattctttcagctaattggctacagtggcaaaagtatcaaccaaaatttagaatagccttttgtatatttaataacaaagcatgcagtagcctatgcagacagtagcttttaataacaaccttaaatctggcttgagcaccaaggatgcatttttaaaagtataaagtatatttatttgcaatgactactgtagtggttgaattaggccccaggacccccccaaaagacatgttccttcatgtgctaatcaccagaatttgagatattgtcatattggttaagcagctatggacaggtgttaaatttaggctgtgaaaatgaggctgttgtcatagataatctggatgctttatcaaaacaatccttaaaatagagaggcagaggtagattgtatatacagagggggagatgtcaaaaagacagagcaaagtgggatgaagccacaatccaaggaataataaaaatcacaagaaaagtggcaaagaatggattttctactagagcctgcagaggagtgctgtcctgccaataacttggttttggatttgtggccttaaaaagattacagaaccagaaatctactcttttatcccactgtgtttgtgggaatctgttacagtaaccataggactctaaaaggaattttagtatgagatggggtattgctatgacaaatacctatagatggaaaagtggctttggaattggatgctgggtggaagttagaacaatttttgatgacgaacttaatagagaaactacagattgcctgagccactgatgggaatgtggatgataaaggcatttctggtgaggacacaaaaggaaatgaatattttattggggaccagaagaaaggcagttgttgttatatagcagcaaaacagaagacaaacatgtgaattgtcgctgatagttttgtggaaagccaatcttgatcttgtaagtgatcaagttgggtatttagctgaggagcttggtaagcaaagtggtgtaggtatgagctaattcattcttgctgggggcgggacagaatgcttaagagagtgaggaggaaaaaaagaggataatatatgagacatgaaagtaaaatggaagttaccgatggagctgtaccaggggtagtggtggaagtgagggcaggaggatagaaggtagggagaagggtcaacagaaaaagaaaatatgcatgaaaatatcatagtgaaactcattactttttgtcctactttaaaagagagctaaagagaaggaaatgaaaatgttaaggaaagaaaaagaagaggcaaattgaagaaagaattgttacgtcaataaggaaacagcacttgatttggtaaattctgttactcttaatgatggtaaaatgaaggaattctgtgtgaagacgttctgtggagtgaaggtgaaggatgtggcctaccagcttttaaaggatgccactgaatggatcaggcatacattcctggattcattcaactatctcagagaaagccacacacagagctgaccaggactattgtaagtcacgtaagttaattatgtgtcctctgaagggttttctaatgtttgtgaaaagcatgtggaatgcatttaaatacaaatatataatttatcaataatagtacttcattcattcttgtttacaaactagaaaataaggcaagttcacatctggaaaaggtgatacacgtaagtatttcaaccttaaccagttagataatatagcagggcaaatgccccaaatttcagtcaaagtttacatttcaacatcaattttctacagcctgaaaagctaaaaaaaaaacccacaaaatctcaaagaagccatatcacaatatttcagaaaatactttgtaaagtcaaaaacgcctatggtcgttatttacattaattggtagaacctaaattttgtggttattgtttttaaaaagtgtgtgaaagtggtatattcttaagagtgtatgtgtgtgtgtgtttatgtgtgtagtttcatttaagaaaaaatggaaaaagactcagacattgttaccttctgatttctctacttatagcagcttcagagtattttgaagtataatacccaagtaagaatgcactagagtgaaaggcaacagtttaaattactatacatctgtataaagagtctgtgagctactggtcacttgtttacattatctcagaaggtggcttgtcaagccagtcatttgttcttttctctgaatgtctataatgtgctttggagaaacagaattttctacataagaaatatacatacaagcaatcttttacagcaatcacaatcatctgcatgaattagtcttgaaattacactccagagaatttacaccaattattacaaatgcacattgtaagagaatagacaagttaagtataacttctgctctctcacacatttaaaacaatgctgagcttcttttgctgctagcgttgttttggcagcatcactgaaatgtgttaataatataaggtaagtaagtatgctgatgacagggaggtttgccttgttactggggtatggaattactacatgaagagatctaaacacacacacacacacacacacacacacacacacacacacacgcatgcatagaaatttgctttacttcaaccaccaaagtagaatgggaaaaggggtcaaacgggagagaaaacaattgacctttctaaagttttctactgcctcctgcataaagaaatcccttttctccctctgggcagttctgatgttctattccctacctctcaaggaggaagggagaaagacccactggagcgaagaacccggaatcaatatcttcctctcaaatctaaagaaaggcaatagaattttcaggctcatccctaacatatgcatgaacatgtagaggttttctcaaaaatagctatataaagaaatcctataaggcagatatttatgcagaattagaaaatacttcttaaataaagttgaaatctagctgattctgtgaaactttggcttatttttagtaatagtaagtgtgatgtcatgctgaaacactaaaaaaatggtagtattaatttctgccaagtggatgactccatcagttttcatttgagagcagttctaaataccttaactggggcttatcttccagagtgtgttacatgtaccttgccgattattaacacacccattctcttgcacattacactatatacttaagaagagctagaagtagacactgaaaattcttcctgtcgattccccttctttctttctttctttgtttgtttttttggagagaaggaaggtggggtggggtgggtagggtgacctagaaatttcagttttaaattctttgactggctggaatgtttgtagaagccttaggattcttccatttgttttttagactttcatcttcacagtcaggtcatcatacacaatgacaagtaatgtgcctctttacactacagaggaacaaatgttttctaatcatgacagctaggttaggattagtgtacttacagtactcctacaaatacacattacttcacgcagctcagcttgacctttgtggaaattcatttatttccattcaaacccttcagtgtatattttgttctcaagatggatgattttgttttcttaaatgtccccattctctctggcatcaggaatcacttggctgacatggcttcattgtggcgagaacgtgatctttctagagggcaccgtctgttatctgtaggacaaagagaagaagaagagaacacatggtgagctttagatcctgcctattgcacagtgtcaggtcgagagagcttttcaaacagtcttgaaaaatcacttcaaatgaatatggaaataagctgcaaagagcccggatctgaggcgtttacactgcagctgccaggctgagttcaagagatctgcaatcagcaagaaatgatttttcttggtaagcagaggcagagtgataaaagaaatggaagaattctctcaagcacagaccccttggaaataagcaggtgacaacaaaattcccaggtgaagatgttaaattgaaaagatccatgtacagtgccttttgttaaaaacctcttcaatccccatgaattttcaatttgtatgctgtctacctctaaaggacatcagtgtatgccaagtgtgtgtgtgggggggagggttttcttttttttttaacaatgattgcaatatatggcataacaatgattgcaatatatggcaatcaaagtagctactgagtttgcctgattgtatgatgtaaacaaattcaatacattatatagtcattacaggaatgaataatgaatgggacctattcttggtcccattccccctacccatcacaggaagaataatcactttagagatgactgttagcacaaagcttggaaagcaaagtttaaaagcattgaaagttgctgaaaatagttttagctttaatagggagaaggcttacagctctgcattgtgatgatcactactatattattatcacctctgttttatgctcagcttaaatgcaattgatgtgggtgaaaatctcttcctggcaaaagcataatatacttagattctctatttagaatgagtctcggtccctagaaataatgacaaccaccagcacttacataaatgctaacactttacactagttaatttgctaattcacacaacatccccgggaggtaagcccatttcattccatcctattatctctgctttagtgatgaaggttacacagcaaatcaatggtatgatgggagattataatgcaaagttaatgcctaaatgtcaggcctgctttgttcagaagtagatattggagtctcccaagctgctattcatttcctccctaagatgatgatggcccactagcacatcctgtctctccatggggaggctggactgagaagtgctgaggttttgtcgtgatgcctttctgggctgtgctatcatctcttgtctgactcccggtagtctgtggtcaatacacagcaaaactttcttgcacccatgaccttggcctcattaacaccaccttgtgagtacactgagcaaactagtcagaagtttaaagcatactcattgcttcagaatgcaatcatattgcaaaaaagtgagaaagcaagaggctttctgtacttggagatacatctgagtgatgaattatttgggtatccttttgaagatacaattaaaaaatccattatttaatttgtgatatggatcacaattcagctaaaaatgtgaagataacattcctggataaagggcttattacttagatggcacaggtttgcatacagattagtttgggacttcttagaagacatttaaaacttaagctgcaatcacatggttcccattgcttttcgagaattaaaacttcagtgttctcagatacaagaatgatggtagcattcccagagggttgtgccagctctctgaaagaagtgggtgcactggggatcctataagctaaggtcaacaggtattcatgcttccctccaggaagactctggcagcctataacataactaacatctagtatatcacctccaaaactctagcctcacagtattaaatgataggatgtgaggattcacactagcttgtaatttattggtggcattcggtgtggcaaaatgcttttgagctaaagcaaactgactaaaggacgttaaagcttttagaaagtggcataagcattggttcaggacccaaacctggctttataactgatagaaaagagaactactttagattttctttttttctccctttgatctccccaatagaagcctagtaggttcccaacttagtaagataattacataacgaagaaattctgtaactcatatttttgaaatatcaacctacaaccttgtttatgaagaaaaagccattaaaaacaatgacaacaattttggatctgaatttttaaaattaatttccagttccttatacttatttgaaacctatttttgtcataaaacatatatttgtaccataaagttctatggatcaagccataagtggaagtaaacacatctcataaacacacacacacacacacacctgtattttcatgtctatacatagatttttcaatctgtcttcacgtctaatggctaataatgtaggaatcatgatttttcttgttcaagagtgacttcatatttgaataagaaactgaaatactaatgaatggatatttgaaacataacttccatatttatggtattcaatactaataatcataaggacatataaggacctcataagtcagcatcacatttataataaaaaaggaacctagacattattgctgtcagaagtaacaaagtaattggggtgattgtgaaaatgatggcagctcttgtttggaaacaggtggagggaaggagtaggtggtgtgctatatgatttgagggcttagtaagccctactcaggaccaagttcatttccaagtcaaccagaatttggtaagaaaaccctagataattctccttattcgtgagagacaagtttttgaaataaactctatgtgtaggtgatgctactatggaggttgaaatctttaaagagtggtattgaagtgaaaggtatacttatgaacatgcatgcatgctatggaggcagatagtcttcaggaaatcttccaaatctttcaccaaaggagaacttaagcccttgtcttgcctttaatgtggttctatgacttctaataggctttccatgtcaaactaatgtcaaagctgtccttaatgtcataagagcaagaagctccatgccttctctaagcaaaagtacatgtggcattaatttctaaaccttgttcactattgtagtaagtggattaaacacactgtggtacttactgttctagaaatcactcatacaatcatttatttagtgactatgtaaataacacacaatgtaggatacaaataaatgccattatgttttagatttatacttacacctatgccaataattttgttgttattgtaaatgccaagtaaaataatcaaagactaagcacaggtcaaacacagcgtaaaacttagaggacataagtcagactagaagtctcagttctgcagtatgcaacctgggggtgtacagtcaataccctaataaagtgtatgcccagggctgtatcttgcatactaaatgagatggtcaagttgagactgaaactatgataaaaaggccatgtccactacctcttcttctcttagtgtaatgtgcctctgtagtcctctaaagaataatgcctttaaaaaatattgagctcaaactaggcatgcaatgaggtgctttatcctttccttgtagaaattttgttattaaatgtctgacatataatacttagaacatgatctttaaaggccatgtattcattttatattatgcaaatatatcataatttactagtcatttattttctgaagaatatctaagtatcaatttgatactgtaaaactgtagcaacaatggaaaaatgaccatccttatagttacatccatatgtactccatgtataaaagaggcattactaaggtattcagacataaccccaaatagtattagagaatagttgcattaatttaaatccaattggcagtacatgaatttgtctgtcttatctctttgggtaataatcttttaaaatgtgctaatctaaaaagtgaaaaatgacatgattcattccttttgcattttttcaaatattagtgaggtggaacttctcatatattaccatccatttatttttcctttacatgctggccttgtcctttgagattttgttatgctgtttggtttcgcacatgatatacttaaaacagaaactaagtgaaatatattagaaatattttccttcgttatttgactattttgtgttatggatttttaggactgtatggtttcatttttttactatttttatgtaactaattatgtcaacatttatattttgatatattcttttattcccaactttcgctagtagccattttctagtagacatgtctctaatatccagacattttataagtatcaagtcataattcttcatggtctttaaagtttaatctattcatatgtaattactaaagatatcctcaatttattttctttcacaatgccagataagcttccaaattactttgttccttgttttatttttctttgcaaaggacatatgttgctccatcacaatttggtgagtaatcatcaatgactatacagattcattatatcctttcttatcatactaaaaaatactggagtttctattattttagcataggtattattctgaatttctgtttaaatgctttctcatttcattatttgagcaataatatctcaataatttctctttcatcatcatcatcaccatcatcattattattgctattgtaataattatttgacaggcatgttcttattatctagcccaagttgttttgcaattataatcccctggcctctgtctcttcaatgctaggattaggcatgtgagctttatggtatgttttagtgcctgttggagctagccttcgtcatttatattttcatttaaaacacatactttggctagtgctatggctcagtgctagaacacttagctagcatgtgaaaagctctgggtttaattccttaaaccacccatataaaaatccttatgaggcacaattcagcagtagatatcatgttataataataaagaaccccaaaaataacagaactcaataaacataaccaatggatcctaagtataccctagagataactcagtatttaactggaagtgcactgatgctcagatctgtgtgtccacgtgtgtgtgtctgtgtgtctgtgaccatctgtatatggtttcaggatggaacacaaggcctcatgcatgccaggcaagtgctttaccactgacatatgatacctcccaaatcccttttaggaatctccaggattctcattttcttgaaaatcgaacaaggcctttcccctcactgtcttttgatgggtttttgtgacagcctggccacctttctttgggaaatagagcagagtccagaagtatccaaaagaacatcattgattataccaagacagcaaatcttgttgttttgcttctgtcaaaagtgagtaactgcaattaaatgtatagttttgttacctattgataatgtctagtgctcccagtttgtgaacttcatgttctcctattttgggcatctaccagatatcatttatcacattgtgtttactggctttattccattggaattgtattcacaggatgctatgcaaaagagcatgtgcaggagccaatcaattacctctctgctcaacaattaaagttctagcactatctactctaatgtcaatgatattacagtgtatttgacgcttgagcttgaaacaggtcacattgcataatccacattcttcaaagaaatccatgcaaagaaaacaggaacttagaatactgtggtagttcaggttggcagaagagtggaaagttattttaacaatgatggtaatggaaagcaataatgttaaaatagttcagaggctactgtgactatagacacacaacactcattaactataattggagttaagcacatgtaatgataacaaaatagaccccgaaatgcctttccaattggaaaataagcaaatacgttctgagaaacagcatgcttttgtgtgggaaatacagtattctaattgagatgcacaaattattttcacattgatattgctgagggtatgatgttggtagttttttatgtttagggatatagatctgctagaggtaacatctgtacaaagaatgtatttccttttcttaatactcagcattcgttatgttattaagggaaaagtctcaatagttgcaatggatttattaattcagcagcttgttatcagcatgaaagtctgctgtgctaggggaaaaacaaattatattttataaaactgcagtactgagattaaatcacctttctatatttcactttcttcttatccttcctgccaggtaggaactctactctctatctctattatcaacctcatagtttgcaaactaccaagtcttgtagcaatataagggtacattattaaacaaactcaattatagtaactttaggaagatagaaatacaagataaaagtaaaatcacacagtacaataatattactttaagacattaaaaatccatattaagctacaactatagaatctacgtgatactttctgatactttcatctttcacaaacatgttgcttttataacatgtatactcaacttgttggcattttaaatggctgtcatttacataactgataacttggtatttcaaagggtcttagaaaaatgtggtgcagataaaaagaaaatcagtatacttttcagtatttcaactgccactgaccttgttattgattatctttggactcaatgtcacagctagtgaatagatttttttaaatgtctttggctttgtacattagtcaagcattttattcgcttcttaactagagaaccacattttcgctctgtgaggatgagagtctaatgaggacatctgcataagaaaatatcaaaaatgcaaactaataaagtaagaatattagaacatactaggaaaagttttagaggaaactctctaagtaaaactcatggtggcgagtaaatattggacatcttgcaaagtgaatcagagctgttcatagtggctcatatgcagccgtttcttaaaaactgttcatgaagtcatcacccagtcactagcaatgaatcaggcactgatccttgacttcaccttcagctatgctgtttacacagaggacatacatctttgccatgaacacaaggaaagacttctttctatccttccatatagctacaaattgttactgcataacatatccacctggtacataacaggtaaccttacacattactagggtgggaaggataaatgtaccaagagcaataacattaaattaattatgtgcttcttgtagcagcaacttcattttaaatgcagtgcagactccaagtagagaaaaatcttatcccttcaatgcaggagttataggtcaggcaaaattttaccctcattaggacttaaaagataggtggggcttaaacacaatgaaatagaaatatagctgtcaatttctgattaataaaaatgtgagttttaattctctatattgtggaccattcagttatgcaaagttttcttttgggaggtgcaaaaagggaatggatatataaaaggaaaatcagaataagtatacatcttaacttgcttttccccaaggaaatgaataaaatgacataatgaaaggaaaggaactgtttatacttgtagcaattgtagttggtagctatttccataaggacatcattttaatttaaattctgtttcttaaaaacaattttcaagtatttacacataaggctgcaattctaccttgggacagtggggaagatcagcagaaacgaggctctctgaagtcatctagagaagttgttgaagcctacatagcagtatcgagagtggcagtacaagggatggtcaaggtaaagatgacaatgatctgggccagagtgtttggcagggtgagagactgagtaaccatttggtttggtgctgaataaaatagctgctaaatggcactggggtcaactcattactatcacctgtcatctgtgtgactttctattcgatgggtggcatagatccctgtgactaaaaatacttgccatcagccatttctcaaactttgatcatatgatggacaatcctctgtcattctccaaggcagttgtttgtgatctgcctgaggttcattgctgatgtgctgacctagaatacactcacctgtcatctgcttttgtttcagaatcactctaaggctatacatctagtcttattgttttaacatgtgcaagctagcttttgggttcagattccctatttctagatgatgatggaggtttgatagtactcaggccacttctctggcttaagtagctcctgtgtgggagctttcagtgttaaggcagaaagatggtcctttctcctacgcaatatgtccatctcccaaaagaccatatcacagtaacaaagcctatggttttgagaagatgcttaacctacagtttacaatgcaagagtctataaacaggtgttcacatcactaatgatccccatgctagcctctgcttaattacttaaccagttgtgtggacaaaggcaacctgtgtggttaatattacagacactttagcagctgtcagtgccattgtttttaaaatataaactgtcccttacggtagaagccagtcagcagttgttttaaatatgaacaattaagagagttaacacacagcttctcaatttcatattcacaagtgtctggaaatcctttataattttagtgtctaatacagcccatgtacagcctgagcattaggcaaagactaaatgaataaagatggctactaaaagcttactttttgtggaagaaaccttaatgaaccactttaaatctactggggcaatgcagtcatcatctgatcaagaaaaggtgaaaacacaaaagactgctctttcagatgctttctaagatgctgtttataggtcatcatgagattcaatatagtatgagactgacatgctgcctactgcgctaaggagacgcctatgagattcaatatagtatgcaagttctataagtggcttattctgcagcgggtctaaattattatatagatgcatacatactatagacaaagaagcccgcattttaaagtgtgaaagatacgtaaaccaggaatatgtcatattcacattagtgaaaacatacaatttataactctaaagttttcgaaaggtcacgtaccagtaaaatcagcaataacctctagatagtgggatcatgattttttcatttaggttttggagggagctaaatgcccagacaatgatttttcttttatctgctttccctaatgcatgatattttgatattgaacataagtaatttgttaaattaggggtaaaatgtagataggatgttaaattctgtctttaggtgcaagtcacatactgcttttaacttttaacaaacagaagcccgacaatgttcaagtgagagcctttggagcactcagccctaaaagagaagtctcaatcatccccctcccctcaaggctgaaggatccatgctgaatcgtagttgagatgatttgaagagccagtattggtggatgactccagggcatcagcatttcccacacccaacagcactgaggcacatatggactcactaagataatatgcatgagacctgcacaggttcaaaacagacagaatcctagcactgcaaaggggaggtatcacaaagtcacccccctaagcaagaagatatttgcaactggttcttgttggggaagggaaaatcaattttctccaatagtgtcactggctctatcaaccagactccatagcaggccccatgttttggattagttggccagtcacaaatggacaccatgttttctagtgtactctttgttttcttttggtacttttgtaccaaatcaattcctggttgattatgttgttacttaatatattataatgaagagggaaaataaatggacagaaaacaggttcaattacctgttttgtctaagggcttcagaatattttgtgataggaaacacaaattttagaggctaataaatttgtttccacaattatcaattataaatacatatcgcatatcttagactctaacttgtaaaatctgaagagttaaaaagtgattctcctgtggggcgttggtggcacacgcctttaatcccagcactcaggaggcagaggcagatggatctctgtgagttcgaggtcagcctggtctctagagcgagtgccaggataggctccaaagctacacagagaaaccctgtctcgaaaaaccaataaataaataaataaaaataaaaaataaaaaagtgactctccttaggagactgtctccacaaagattggccaggatttaaaagatagggaggtgtgcaatgacattatctgtagagagctttatcttaccaataaaatcacatgagataacaaaagaaatgactaattcaaacagttaagactcttttcatagatggtaaatgacagactgaaccatttttcggaagacatcctggtgtgatggctaattttggttatcaacttgacacatctgggaagaggtaatcttagttgagtgtatacacacacacacacacacacacacacacacacacacacacacacacacacatcaatcaacaaggctcaagtgagaaattatctctacttatattggatagccacagctaagtgtttcatgtaagtcaaattctcactgcatggccatatgggtttatatctttgttctgcctcttaatagctatttctccatttatgttcctccttgtcaccatggaaataataaataatattaactatctacttagcagtatagttaaaatgactaaataatggcaatggaacatgatggcacgtgatatagaataaaagcttagtgtctttaatacatgccattacaagagtcaaatttcaaagatttcagtggacagattttacacgttttgaagtctagacagactaattacagtaccatgacaaattttagccacttttgagccgatgagaaagttttcaaatagatgtttttaaacaatctttttcacattagtccataaaaaagacttaataaagatcagacaagaaatcagaatttaccaaagttctgactttgtatttatttcacaagtcatcacaggctaaggttttttatgcccttgggaagcaatgaaaatcttttatactatatatttatttttcttattgtcatccagtgtgtatagaaatgttgccagtctgctttctatttcttctctgctttaggattccagttgtatggacagatttgtcctaaggatagaaagagattatttctagagattccagcccactttgaatgacgcatctaggaaaaatggtcactcattttcttccctcctagaagagcagttttaccaggcaacctgctgacctttaatttgctttcctgagtagtctagtcactggaaaaggtatgggggggtatgtttgtctttattagcagactcttttccattttgtgcattactcttgctataccaaaacaagcatgcaatttatttcaattacgctttctgaagagtgactatgtgccatgcattgtgtacaacaataaaacaataaaggtgacagtatcttctttggcagctatggtgtagtgtttgtggtcttttggtttaaaaattagcttgacagagatgttaagacttcctttctaccctgctacatagttctcaaggagtttggttgataactcaaaggctatattggatctggatattaaaatgaaaagtcaaccttcttcctaaagttacttttcactccactagggtagcatacaaggataataagaatccagtgacagtgtggccaagattagggtatactccttaggaacacagataaagtcttgggagagaggggcatgacttgaaggaatttcaatagtaggtaatattgtaattgcttgaaaagaagctaaggctgaattgactgggaggaaatgtacagtctaagggggagacattgtattgcggagaaaaatcagtatgcatctataagaaagccagtagtaattaaaaacaagacattatggccagatgactgatacatcttatgtaccacttttaagtctcttgaatttcagattatgaaatagggagtaaactgtaatatatagtgttatttgacgatcatgtggtagattaatttaagagaggacaaataagaattatggattaactggacatggcagataaaggagtaaatgctatcttgaaagcttctagtcttacacatatacaagaatggtggctccatcacctaagataggacttgcagcaggaagaagtactttcaaggaaaaagtgatgagttctgtttagtatttgtcaagctggagatgccttcaaaatatttgggcagagatgaccagcaggccataaagtaccacaagagtgaagttcagtagagagacttggccaaaagtaagagcaatttggggctcactggatgcatggtaaatgaagccatcacataggaaagtacacagactgaggttcatggcttactgatcagattcagggaattgctgctacttaagagatgagctcaggaagaggaacccttgcagaacatagacagtaaatactcagagaggcacagaaagtaagtgtgcattgcacaaagcaagggagatgattttgaaaaatggaaaaagcaataacatcatatactgtagaaagatgcagtaaaataaagacagaaaactatcagatttagaaatatggaggtcattagagaccttaatgagagcgatttcaatgaaataaggtgagcagaagcaagactacagaaggttgaagaacaagtggaggcaatgaatataatttacacttgcatttttcatgaccctgaaagaggtgatattttcttagagcaaaatcagttacttcaggtcattgtgcctgacatgtccaataccattttcagccagaaattgtcatatacatacataactccttcaataacagctgccattgattggaccatgatggacatctgccctccccatgggaagttgattcataggttgcctagtaagcaacacatggcattgtatgtgataacaaggtaatgcttaactgggtagtaagccagtttaatataaatagaaaagaatgaacagacatgcagaaagaagtgaggcctattttgtttcttaaggtgcccagagtgtttttctgttgcaaaatagtccaacatgaaaaaaaacaataataatagatattccaggtttcatagctaatgttattaaaagtagatagtgatggcccctaggttattatttctttgggcaagtgtatttatagttgtttgctttcatttataaggtatagtaaaagctatcggcattggtatatcttatagcattttgtaagtaatgaattgacgatgtcaagacatttttatacatgtatttgcttttgcattgcctgaattatcccagggtgtgatacgatttcacctaacagtgtagacaaattgcacatgagaacatgtgacatagcagtcaacaccatgatcagaatcagagccaatgtattaagacactgcaataatcattgtgattgactttaagctctttattctttatgaactgagtggaaaatacacattgaataattctcctgtccctgacccaaacaaaaatggattagagagttatgaaaatttcagtactaacccagtctccatatgaatagttcaattttacaaagttttttagtagataccctatttaaaccacaaatttgaaagttttctcagtttcctttcaataatggatgctggtgatcccaaattctatcatgaagtcttgaatttacaatgtgggattctgtccagcctatttataccacacagatttgctgcatacatatcagtgaagtggaaaaatataggtagatcacaagccacatctttctagtattaagcctagcatctatggaccagaaaaataatgctggttttatttttatcagttgtgtagtgttgttaattacaacagaaggaattcacatttcttttttatatgttgtcactgaaatggtaatatattataaattattttagaccaattattgtggctggcctagggtttctttttgtggctgccataggtttctattctcactgtatcgggtctgcaatctcttttattactcctaaaatctggaaaatagtggaccggccagatcaatcactacagtgaggtttcccacccttcaagtcatcttccaacctgcctttgtaagcagtgttctcaaagagatagtactccccagctcaaaaggccacagtggatttgaaataagactaaggtggctcaaccttaatttgaagtggtttttaaaaaaaggacaaaactgcaaaggaaattgttacaagttaactttcagaaggacttcagagggctcacatattaaaattcactgtaagataaaacacatgaggataaaagtgaacagattcacactaaaggaagtagctctgggagattagaatacatgtgtgacatatttggctctcaattctgtggcagcaaaaaatgccaaggagaaatttggaaagtatgcatttattggattctttttgtttgttcacaaatcccattccacccaatctgattcttcccaaatcttgactatctccattgaatctagctaggtttgccttcacaacttttctgtgaaaatggccacctatccatgttggatttttatgcatgcattcttctgtccccttccttctattaaaaactaccagtcattgaaaacccaaatagaatgtcatcttcccgaaactttagctttcatttatctttctttcctcttgactctaatatacaaatgcgttgtggaccctacaattcagcttttaatttatagacagcttcctagtcctcactatcattttgtgtacagcctttatgagaggactgcattgggctaggccagaatgcatctctactacctcttgatgagttcttgcaatacaacccaggcatgaattaaatgcacattgattctttttcttagtaaaacttttatgagcatttatagatatataaatatgtcacttgtttccataaatccatatttgtgtgggacaataaatattttacaaatgttatgttttcaatagagacttttactatgagtctaattgcaaactgttctagagatagccttgcatttttaggacaacttagagaaaaggataatatgtatggttaagttgtgaagtagtgcatgaaatgacatttagcagcctggagtgttccaatgttgactacataaaaagagacaatgaattgaagtgaaagagacttccttggaaggctctctcctgaccgaccacattacagtctcattttgagatcctccattttatcctattctggatactagtcacacagaaccatagccatatatatcaaaatctcaagaccaaggcaaaattcatacacaatgcttctaaccgattctgtcaggattattgaactacttttgtaaagatgcttcagtagcaagtactgtcttatgggttagaaaaaagaacaagtgatctagggagaaatctcactatttccacaagtatgaaatgtaaagtataaggaaatttcagagtatgattctattaaaaacatgatactttctacaatggctacatttatcaataggcttatcttgaatccatatcatactcctacagtagttttctttttccttgacctcattgttgttcatgatacttttaacaattaatcctggcacaaactctcttcctttggcttgtatatcatcactgttccttcatcttcaaactacccctttgattggtctatgttttaaaactactgttcttttctttctccctatatataatggatcttgtgggttttattctttgcccttttccatattattctacgtatttcccatgagctcttttcatgggtatatccatctatgtggaaaacatcaactattcttcctcctgtatggtaatggatctaaattcttgatttcctaggctctaagttacagcttcaatcatctttcaataaatcttcttattgtagtaaagctaccttatatccaatatgcaaactagactgatttccccttttctatttgatttcccccttttcatgtttccttgatttgagcatttggactatgttatttgttgaattgtttctacttaaaattcttactttttagtattaactacttgcatataagaatgaaatgactttattttgagatgacagcatctttgttgaggtagacaagataaatgaaggtattatgtcaagtatggtgaaacctcagttttcaggaggcaaaggtaggagcctaaggatatctagtctagcctaggtgacatagtatgtttgaagctaaacatggctatataaagaggttaaggccagcaatgcctgcatagtaagtccttgtttcaaataaattaaaacatctccatggaccttattaccttatatttcatataattataacaaggaataagttagaaacaaacataaacaaacatacatgaagagagagagagtaacatttgaagatgaaggaaagaaacaggtcagtgtttctacccttaaaactaccaggaactaggagacaggtctagacaaggaccttccttttatgtttcttttttgtttgtttgttttgttttttttgagacagggtttttatgtagctttgaaacctgtcctggtacttgctctgtacaccaggctgccctcagactcacacagattcacctatatctgcctcccaaatgcttggattaaaggcacgagtcaccactgccctgcaggtcctttcttaatgccttctgaggaaggacaggttcataccttgaacccagtttttagcatccagaactaaaaaaagggtacattcttattatttataacacttggtttgagggattttaataatagtcctaaaaagctaatatagccattctacaccaacacataaaattaattaatacacaaataagtaatcacaggtatatatttctactcagcaaatcagttatttgtaattactttatcattttctttttgagacaaggtgttaggcattgaagtcatactttactccctcatcctcctaagtgctggaattatataccatttctagctcccgacccattgtcgaatctgtttcctcattatcatgtccattaagctactccatgacaggtttttactttttttttttgagatagggtttctctgtgtagctttggagcctgtcctggaactcactctgtagccaggctggcctcaaactcacagagttccgccttcctctgcttcccgagtgctgggattaaaggcgtgtgccaccaacacccagtccatgacaggtttttaacctcctatgatctacactttttttttaaaataaaagattattattattattgttattattattattattaatattattattattgtgcatgtatgtaatgtacacacaagcatgtgccaaagctcacaagtggaggttagaggagaactttcaagagttggttctctttttctaccatgtgttccagttattgggcttgcatgaaaagtcattttaccctctgagccagcttctggtcactattgcctatattcttagacaagactctttacatctttcctgcctttggtcttaccctcactcaatcaatctttcacactgttaggaaacagtcattctatgagggcatatctgatcacatcactgtaagttacatcctgaaatagacccttacaatatccacttgacttcctagtttttatatctatgttccagcaatgctaagcatttggctcttgcttgaatgtattatgtttcctattacctgcctctttgttggatcatgctccttcttctttttatctttttccatttcttacccaagaaattctggctcattattaagagttagtttgaggtttataccatgatggcccctgtctaatccctgcctctttcattacaaactgtacaaaggcagacatttccatttttcctgttttcttgggaccaagaatacaatagacaggaaattatatataaatgtatgcacaagtgaacacattcctttgtttctgcccagagaaagtaaaactattacagagtgcaacgttcatttgagtggttaagtttctatgtatctgtacccatgcatgtgtttgtggcatgaaaagaattcatttgttaagtcacttcagcctcaattgagttttctggtaaagagagaaaatgatatctgtctttcatagttgtccaagaaacactgcacttcttttaaatcttccattgtgctttgccgccttcaatatgacaggtctattggagatcaattagttcaatggtcattatagggcagaattaaattcatctttccattgtttcgatatttttaggtctgtcaaccctccttagttatcttgtgggagaatcacaggcagttactttgttcttcctatactacagtgacacttgagaaatgaaactcccccttcctacagaatgcctaattgctacttttttcttcagtaacagaaatcctccttgataacattctattttatggagacaagaggctaagtgatcctcgttttctgataggttgtttaggataacagacactccattccccctgcctcccaacacttcggtgacttcagtcattctgtatttcttgtagtacttgagatcatctttattatcttcagaatgtaagaagattgtgcctaggaaagcaaatatccatcttcttgttccccaggtaggcctagagcaccaacacacacacacacacacacacacacacacacacacacacnnnnnnnnnnnnnnnnnnnnnnnnnnnnnnnnnnnnnnnnnnnnnnnnnnnnnnnnnnnnnnnnnnnnnnnagagagagagagagagagagaatctagttaacacattacaagaaaacatactgccaagaaaaaattcagtgctttcttgtgaaaacagtagcgagtcccttcggaacacagcattgaaactgttccactaagcctttaatgtgaatttgctcaatgggaccgtgcatacaggtgtacaacaattattagatttgatatctgaatgagctcaggttcccattagagcttgactgcttcaatgaccccattattttgcttccactgctccccgaactgatcaacttaattattctgactaacgaaacatttaggacatgaatttctgatttgttttaaaccatgtgggacatctaaaagtgcttcacttaaaagaatcacaatatagaaacgactatgtggatatgttagaaactgggaagtagagcagagccatgatccatgctgagcacacagatactctactttcctggaatggctcttctgcttagatttctccttggtaccagttaggccttagtgatgactctcgtacctggaatatgcaatgataaaagcaatgtgcccgtggtaaggggcagggaggaggtggaagtgaaatctttaattctctgttataaaacattccaattcttaatgtagctaatgttcaggacaaatgaaatgctttgcagaactagccaatcatagacattcttttgtaatgataaaaaagagaagtcagaaagtgggaccaacttcagagttgatgtgtaaggaacacaatgtcttattagttgaatattgttgtctaattacagtcttgaatataaagcatcatagccattacatattggatttaagtactaagtataagcaacaaggtatattagcaattgtatgtccctggcataaacaacatcatcaagagagaaataagtcatagtcgattcataatttgtctctttaaaagcagctccaacatcccctattatttcagttttcattgatgactcttaaaaagctgcgtgtttacctagatgaaaagaaagcattaaagtgtcactagtccctcaagttttacagatgccagtttatctctcatcagtgaaagcatttgtcctttaaacaaatagaactgacatcaaaatggtcccccttgccccttgcctcctttcactaatgatatggtaagggcagctgagcctgcaataaatgtgtttgtgtccagtcatattcctgtcacttttcaacctaattggactccttaaaaataataattaaataaataaacgaggaaggaagtcacaagagagtagcacaagttcctgcttccaggtactctctggcatcagccttcacttcgcacttctgctcaaagtacctgatttgacaaagcacacagaaaagtcagagacaggtctcttttccttctctcccaaactgtctgacaggagtcaataatgatttttgaacacagctacaatctaaccatcagagatgaaagtgtgaggggaaactttcaagctattccttacaatcttttattaaagaaggatgtaaaaatacatttgccttcgtggggcaattttcctcctccggttcaacttaatccactttaacagttggcagtttaaataacagaagttataggctgccatgcacagacgctttgcatgccacatgaaagcaatgaattcagaggcaggagcaaaaccagaaagaacctgaaagaaaagaagcccttcttctctataaaaggatttctttaataacagcagcgtggaaaaattctctgagcttgtgtccttctattgtttcacagaaagaagctatcacatcctgtatcccaactctacatataccaatggactgtcagaagccaacaactcttccctaatattgaaatactcatctactctggttttaatgcactcaaagcacattttcttattatataataagaaggacagttctcttcatgtttgcaatggaaaatcatatattgtaaatacaagaatcttaagagcagtctatccataactaatatttttaggctaaataaaatattaacacttttattcatgcttgggttaccatttgcaattcagctttttgcaatatttaaatggaatttcatatgctataaagaatttattttttaaaatgtagaaaactttaaggttggttctttctcgagtgccttatcatccttaacgtcacacttaccttctggaatccttacagaaaactttaaagacctcagatttgatattagattttatggtaccactattagctgttcactacatatctgtgtccaaatactgttactggattttgaacttgtgcacaatgttcatttgaactcagtgtaggtatttttttttttaaaaaaagatttatttaggagttgaaagagggatggctcaaaggcttgctgctctttcacaggactggagcagggctcccagaacccatgtgagtaattttacaattgtctgataactgcagcttccatcctctgtgaacactatatacacacgtgcacacttgcgcgatgaatgtgtgcgcacacacatgtacatgtgtaataaatcaaataaatcttttcaagtaaataaaaggattatttgtgtgtcaatgcacgtgtgtgtgtgtgtgtgtgtgtgtgtgtgtgtgtgtgtgtgtgtgtaggacagagagggtgtcacacatcttctatcactctgcatggcctttgaggcagcttactacttgggtgctgagattcaaactccagtcttcatgattatacagcaagcgctcttgattatggagccatctcttcagccccaactgaagtacattttacaaaataagtattagcattcataacataatccacaagatcctagtatatctgggctataattagtagcagcaagaatgggagacagcaagtttgtgtacatgttggtacacaaaaactaactccctacatacttgtcccatgcactgactttggtagaaatgatgatgtccatattcttagcaggccaataataaatacatctcctataggccaagtgtgaatattttctttggaagatacagataaaaaatcagtaaaacttagcaagtagatacataaggtacattcctgttgagttatgagatgttgttttactctagttttgtatttccttccatgttttggcttcctggctttaaagtatattaaagagaagaatgggcagaaattttgcatcagatgataaccgttcctgcagtattttctgatacatcataatattatctattctggtatttggtaatgttgagtcctttagtcctcgaatgatactttacaaagagtgaaaactatctactacttcacaatcaactcaaaactgattttcccataactttcttttcacaggttacacattcttaaatccatcagtcccacagctgaaaacagatcaggtagcacagcagttttcaatatatcaatatagtaaaatatatgtatacttataagaagtcttacagagttgtataaaagtttgtgaataacaaatgaaacatagaattttagagctgaaaagaaatttatggaatatttaactgaagttcaacccttcattatatagacaatgacactaatttccagagaagagaactgacctgtcataaatattccatacaatgaagaaatgaaactgagagggagtgggatgtaaggtaatgaaccagacaaacataattggtctatcattcatttattggataattatatgactcaacttcgataaaatgtatatttatgaaggaagatagtgagaacatgacagccaatgatcatctgatgtttctaaataataatcattctggtgaagcaattaggtagcaacagtgagtttaaaactcctgcaaatttatagtaatacaatattcaatgatttaaagtttaaagtctctaggtatacactgatataaagatttgagaggaactgaataataattgtatggactagcaccttgttgagatatactttgggatagatgcatatttaaggacttaagcatacacttaatcatacataactacatatctggtgcttgatactataactttattaaaaggtattagccataattaagaatgaaaagttaaaagccaactgcattgccttctcaggcaatttcattatggtctacactgatggccaaaagagtccaaagctgcggcatcacactgatacttactgtcactgtgtttgtcaatctttgtccttaccttaatgctatttatgtacagtatatgctttagtattcgagtcactgtctatcgcattttgctgtgagctgggtatttttaattcaaagctgtcaggtgaacaaataaaatgggagctctgtttcataaaatctgtgtttacaattatttcccagcatttttatgagctgtacattttccatagaggtattaagaaactttctagaaagcaatacctttggcatgcattctttatgccacttactattgggtatatctgttttaaagtgctacacatgatgatcctttgacttaattcaactctataattttgtgaacaattacatcctaccaagcattcttactagtaggactggtaaggagatggatatttatatatacatggtttatgtaaatgagcctcataatattttggctcaaattgctattgcttcaatatatccctttccttgtcttaaacaagacagctttccagttaatatatgttcaagattgatacataccatcaatgcctcctgatgcctacttaaaatactggatagcatgtggttacctttccaatctcaataacattctgtagtcataaagaagctagcaatactgcatctcagtgcaatatcttttttttcagtgccaagtttggagccctgggtcttatacacgccagccaagcatatcatcaactgacttacatccctaggttagtttcgttcacttttatcagtggaatctgtttttcttagtctttgtgtatatgatgcttgcacatgtgtatttttgtgtgcagaatagcatgtgcatgccatcaagaacatatgaaggtcagaagacaatctcaggtgtttgttgttccttgtcttctgccttattttaagtggagtctcttgtttgccattggactggaagctcctgtgcattctactatttccatctcccatcttgatgtggtaatggtgggataagaaatgtacatgctgctgtgcccagctttatgttcactctgtgaatctgaacttagatcctttgcttgtgcagcaaaagctttatctactgagcaatttccctagctcagtgcaaacttaatgatgccatgtgataagtcagaaaacttcctccatgttacaaagcatttctgtttcaagcacccattgattgtaccatttacacattccagtagctcagtgattcttaacctatgagtcatgacccccttgggcgtagcataccagatatttgcattgttgttaattacagtagcaaagttacagctatgaagtagcaatgaaagaactttatggttgggggtcaccacaacatgatgaaatgcattaaaagggtcacggctttaggaaaatttagaatcattgagataacttcttatttttttatttatgaattataaattatgactttacaaattttttcttaatttgtattagtttggagttcatgtgatgataaattaacttcccactcttattggtcactctgccaatatcatgctattttctaaataaaaattcaaaaaagttttatcaactcataacttaatttaattgaaatcattaaactagaggagagtttggcttcatgtttggattccatttaaattgcttatataattttaaactacttcgtatcaaaatttccaaatgcacttagaaggaaattttatagcaacaatatacatttttaatgaggaaaagcagcttacttatttttaaaaagatctttctttaaaatatgctgctttctaaaaaaatattttatatgctttaaactcagctataacccaagcacacagagcagattcttttcaccaggaaacagccatttatagggcacagcagaggaaggaagcacttgctggaatggcctgtgaggacaaccgactgtatgagacttagatggctactatcaagtgacatatccactatggaatttgtacagaggcatgcttcttggtacatagtagttagtcaatacactcaacgtattagctgcatataaatctgaattttagcatctgaaggctcagtttatcagcttcagggagaaatgggaaattgtctatcattttttccctacttgaatagcctggtgtcatctgcgtgcaggtccttcaaacaactgataaggtcaagaaagagcaactgagtattaagagagatgagggaaaataagttaataacaagcttatactgtctgtatttatttattcggagcaaagcattcacactgtggaaagatttcaagcatgatagtcaggatttatgaggaaaagatttgttttctcattactataataaacagtgatcaaaaaatacttcctcagacttccagcagataaagaaaggagatgcaacttcaattaagtctttgatttatagataatgttgcaacatcacaaacaatgaacctcatattctaccgcaatctatttgcaaatatgtgtgcatgtggatgtgttttaggggagggataggggatcatttttatttcattcttttcaaattagtatgcacttaaataaataatggtttcagaaaggaaatgcaaatgaacattaaacttttacattctttcaaatccttttccaatagatgtcaacatacatgcattgtaacagatatgattagtgtttatatactctcctgtgattttattctttcacttaacattgtttcctacatccattttcattatttgtcaagtaattttaccaccatcnnnnnnnnnnnnnnnnnnnnnnnnnnnnnnnnnnnnnnnnnnnnnnnnnnnnnnnnnnngtattcatttatttagtagcaaaaagtggttccatatgatttattatataagatgttttacatataaattttctctcttcaccttttctccaatgtcaactgcctcatgacacatatctgcaggttcctcaaacacactgtccaatacaaacacaattagatttgttgacaaatttgttgcagacagctgagcacagggactacaaatcatatttttctttctgccaatattttatacatggcacagattctacaaccaaatatttttccaaagtctaaaaattgccacaatggcacaaactttgtttcatctgttcagatcatataagctcttaatctatggatgcaataaagaaaaataagaaagaatgtggaatgttcctttacactgtatgaatatatgtcactgggattggattaataaagaagctggttagctactagccagacatgtagaggttatgcacaacaacttgcagacaaaaagagagtacaaagcagaagggaaagaatctaagaatcctgaggagacatggacagaaggagagaacttgccatagtgaaaaaggtaccaagcctcatggcagagcatagataagaaatattaattttaaattaatttaagtgttatctaataacaagtctgagctattggccaagcacttataattaataataagtctcagtgtggttatttgggaactggctggcaggacagaaaagggtacctacagaagtagaatgattgaaagtcttcattgaacaaatatttcagaaagttttctattctcaactttccaaatgaaaagcatactttactcttgcttctcattagaagtctcccaagaaaaagggaacccacctgtatttgagtccttgcaaagtctttaactatgaaggacattttctaaattatttttaacttaaaagtactgcttggagatcacatattagctctggaataacttcaactgataagtgtttcacatgcttgtggatgtaaattgggggaagttgagatactgtaatttaacatagaactaataactgtttacaacttaggatcttatctatctgaattttggatatcattgtaaataagaaagtatatacacataagacaattgggaaaaacaacttgtgtgtcatgcaaatagacatttatggcttgggataaaaatgataaggatgctatcctacaggatttaaagtgctgtattgtactatgtacttggagaggaatgctctggggaactgttagatggctcaaaaatcagtgttaaagctgttggaaacactattgctagtgataagagtgaatatttgaagtaaactatttttacaaaatggaacagtggactgaaaaagccaaatatattcatgaaggtattattctgtatcgtatgcaatttcagtatatctgtggaactaaactaaatatcataattaggcattttatttatttgcctattgaatatatatttcaaatatattcccaaaattccataatattcataatggacagttaaattttagaaaactttattaggaagatgaaggctgagccattgtattagtcaaggcctattgagtccattaagtaagctgcttaactgtcatctgctccgtgccatgtactgtgtgaaatgaatgacacctcagtaattctccaagcaatcctgcaggatggatgttatggaaagatttttctttcaaatgaggagtgagcctccaagaaattaaaaaccttactcaagatcatgcagctaataagtgtgaacatctgcagacttggagaatccataacctgaaccattatgccatatgctttccacaagttcagagtgagcatccccaggtctgtgactgacaggatgacgtttgatgtaaaacaaaggtgaagtcagaagtaggacaagaacaagtatctttgtaatccataaatgcattaccatcttcaattctcactcttttaatgcattttttatttttaatacatttttaaactaaaaacatgaagaatactacactcatgttctatttagtctcatgattctagttctgatgagattcttgaagaaacgttttggagaaagaaatgtcttcctttgtttcacttacagcatctgtgtgtccacagggcatgaattaacctgaatcacttcatttaaaaaatagatgtattttatatttaattatgtgccggtatatctgtgcagggacataagcatttgagtcctcagatctcctggaagtagagttacaggcagttgtgagaccccagtgctggcgctgaaaagtgaacttgggtcctgtgtaagagcagtacaagctcttaattgctgagtcatctctccagccccttgctttactttctaaagcatgctagttctgcacagcttcccaggtgagttattccctaaactatatatacatcccctttctaaacactcacatctggaatattaccagtctactgttttctacggtttgaatatctgtttccccctaggatttatatggaaacacttcccattgtaacaatattaagaaatagggactacgggaaagtgatttttaaaaaaagaatcagtaatcataataacctgcaacattttctatagcttatgaccctaatatgaactaatgaataaaatacctcccatttggatgtcagtgtctttgctgctgctgatcaacaaaatggtgaccattgtggctgcatgaacttcctgtgctaagttttcaactgaatagttgtcagtaattccaagtcactctctcaagacagaggctgagaagacagagcttggcagcctgagaaagcaggctagcttctcttattttcatttttttccctaaatgcattaccacatccacactgaagctattctgccacttctcgtcccgctcaggaacctcacaagagcttcctgccgtggatccctggcagcttggcattttactgtcagtgaactcagaatagctgagtgtcaacggcatactctatacttcactttccatacctcttttgtgctataaattacctcctcgaattcatcaaagtgctaatgtttagaatggaaggagaaatattaagtataaaattattctccaatttaaaaaaaaaaagccagcacttccttacagtgatcgatggaatttttttctttttagaaaacattcaccctgtctcacattgataatgaaaagtacaccacaacagcagccaagaattagacacgttagttgtccttcctggcaaaactgaaagattaatctactaaatatccaattttattgtcatcaatccttacaaatggtccccctaccaggttgctttctaattccatatgcctcctacatatttcaagagtttaatgtttatcattacttcattttcaaagttttatttcttactccagaaagccttattaatttttataatactagcttttcagatggtaagattacagaaaatacattttctagctttcttagtgatgtatcagttgtatgaatgacaattatgaaattaaaatgttcaattagcagaattccaattttcctgtggatgttttaactgaaaacaaggaagacaagattggtaaagcctgctgtagctattttaccacacaaaagagatatcatactaagagtgtgctttgatttgtactgccaaaaacaaagttaatttacacaatccaattatgattactttgggtagtgactgtgaatttgaaccaagtgtattggagtattaataactgttttgctttcaataaggaccttttgaagaataaattcaaactgattaagtggtagtagaaaaatcactgaattagggctcaggaaacttagggtcaaatctacctcagcctcattcaagcaggaaagtgttaatgagtaggtggcctttcaaattctcagtctctaaagctgagaaatgaagagaatatctttgtcttaatatgctcatccatttcttaaagatatgaaacaggatgctgtaaagttgtttataaacagcttatactagcttcctaggtaatgctaaagtttcattatgattcactctgttcagaacaaagcccatttaaaaatagatcctcttttcaaatgagttactatgtatctttttttattgttggtttggcataaatggatgctttcagataatacatggtttttctggctatagtcatagtagacagttgctacatagtcttaaaaagagctcaaaggaaacagctttgtttttattttgccattttctttttattcttcagcacaaactattctgatgatgtttaaaacggtgatatcaattgacactgtcatgatctggaaatgtctgcaaggtccaatgggaagtcttagcaaatgtcagagtacctctaaggcaaagcagatcctcaagatagataatgattagaaagtttagtactaaagatacagcaggatgctggggaatggtctgcctgatgctcaaaggtcaggcagaaagcaagtttaatgcctaggaaagttaaaataagtcaagtatcattgtgattagtgatgctgaataggtacagggcaatgtaagaaatgcgaagtcaaatatcacattgcaagatgtgtcaaaatatatactttaaaatacactgtttcctttttgacaattacttagaaaagtcatcaactgtgcagacacatcctggataacagttatctgtccaagaatgggtcggctactgtagtcgagcagcatttagaaggtaccagaatagaggataattcacagacttccagagaagaaaatttatgtgtatatatccatgaagccatcctattggtcccacacacccatcaatatctgaggcaggtgagagagctggctctgtggtcctaagagtggagagctgttactgaccctcaccagctgcaacaaaagggagagcagaccctgaaccttgacagggcagcacaatagagactcctgttagctcaggtgtgggtgaaccagccctaaaattctgagcatgggagagttgtccccattacccacctgtcttgtggcagaatgggcagggagagctggcctcctgccacacacccccacgctcattaatgcctgtggtaggtgggagagctggccctttggtcataagactaggagagctgtccctgatccatactaactacaacacttgggagagcaggccctgcacctagacaggacagtacaatagagccaatctggttggggcatgtgtgggtgagccagtcccgacattgtgagcatggaagagctgttctcattatccatctgtctcatggtggcatgggcaggagagaattgcactctttatgtccctctcatcaattcctggggcaggttgggcaatcttagttcataagagcaggagaagcaaccctattagcatagatgtgagtgaaccagccttgaagttgtaaatgtctgacagctgttcccatttctcatctggtggaccaatcatacagctagctgcccaggtctagaagcagggttatgacttgcttcactccaacatacaccccatcaatgacctgcaggagcacgtgaagacatctgacctgcagacacaagctgcaggacctccacaacacaggacaacaacaggatatccaagaggagtgccagtgagggcccagcatcaatagtgtagttaaaaccagaggcctcaaaccagaccaatgactctttgcaatgaacacttgaaagtaaagctatatggacaaaagggatcattgcgtgatttactgagtcacactgcagtttccatgatgaaatattaattttttcactttttaaattttttctcataaattttattggtgagggggcaaggacagagggtagatgcaatgggacagggaaatgaacagaatcaagatacatgatgtaaaagatacacagaataaatttttaaaaagacatcctattggcatgtccatcactggcaattgttgattttaaagggaaacaaatgcatgcatcaagacaacacaaatttgcaggagaaactatgtattttaatttcaccttaaatctggtcagaatattaaactcatcaccatcacaggaagtggctattttgcagtttatggcggtttctacaggctagactgcaaactgcttgaggacacatctatactttttatcgcttaacatctatatagggcttgtcacaaaacttgtgcttaaaaaaagaaggaggcttaattaaacttgcagatacttttctgtcagtctcaaattgattgggagatgatcaaatagcaaatgaatacaaatgaatgtcagagatttagatgaggtggcaggcagtttcttttcaaagcattgcttgcatttcgtgttcatgctggcacatgggcagtcctcaggaaaaactgagatactagaaagagaaggtgatgctaaatgcaggcctcaagaggtgggtgaggactgaagaaggtctctcacaacactgttgaaagaagcttacaatggaactagaaaggggcatccttcattaatgtggtgcaagttccttcattcttatagtatattgtcttcttccatgcagtggtaatttatcctaattttcaggttgattgagatcatacaaatgaaggttaaaagaagccaggaaatagctatctttctctagagctacttctgattttacatgctaagagcttcatgccattttgttggttatgttttcacagtttttcttgatcagttcaagtcaacagacatttactctgtttaacatgcagataggaccaaaaagtaagtacataaaatagaaatctagtagcattgtatgagtacttttaaaccattttacttcataaaatgtttgttatactttatggaaaataatgtgagctataatgactcttctggaaatcagtatggcggttgcttagaaaaatgggaatcaatctacttcaagatccagccattcctctcttgggtatannnnnnnnnnnnnnnnnnnnnnnnnnnnnnnnnnnnnnnnnnnnnnnnnnnnnnnnnnnnnnnnnnnnnnnnnnnnnnnnnnnnnnnnnnnnnnnnnnnnnnnnnnnnnnnnnnnnnnnnnnnnnnnnnnnnnnnnnnnnnnnnnnnnnnnnnnnnnnnnnnnnnnnnnnnnnnnnnnnnnnnnnnnnnnnnnnnnnnnnnnnnnnnnnnnnnnnnnnnnnnnnnnnnnnnnnnnnnnnnnnnnnnnnnnnnnnnnnnnnnnnnnnnnnnnnnnnnnnnnnnnnnnnnnnnnnnnnnnnnnnnnnnnnnnnnnnnnnnnnnnnnnnnnnnnnnnnnnnnnnnnnnnnnnnnnnnnnnnnnnnnnnnnnnnnnnnnnnnnnnnnnnnnnnnnnnnnnnnnnnnnnnnnnnnnnnnnnnnnnnnnnnnnnnnnnnnnnnnnnnnnnnnnnnnnnnnnnnnnnnnnnnnnnnnnnnnnnnnnnnnnnnnnnnnnnnnnnnnnnnnnnnnnnnnnnnnnnnnnnnnnnnnnnnnnnnnnnnnnnnnnnnnnnnnnnnnnnnnnnnnnnnnnnnnnnnnnnnnnnnnnnnnnnnnnnnngggaggagggatgggggtgagtggagggagagggagaagggacttgcatgtgaaacaaggctgttccctaacttgaattaataaaaaaaagatttttattttctactctgtctttatattcctatatcaatccaattgaagagttccctaatgtaagttggttgttattatttatagtatctatcagcatacataataatattatggtataggggatggggtaatggcttagtgagcatcactggaggcctcctgaaggcctgcagtcccagtgcttggaggtggagacaggaatatcactagggttttctggcgaggtagtcttaccaatttgctgagctataggttcaatgagagaccctgcctcaaaaattaaggtggagagcaatagagaaacatccaaagtcaatctcttgcctccataattacacccacattaacatatacacattcatggaacacacacatacacacaaaattatcttggtaataaatacaaccataggtctggggaaacagtgaaattgtacagcaaccacctagcatgcctgaggctctacattacattaccagtaccagaaaaccaaatttaaaacaaacaagcaaataaaatgatacatattttgataatgagtcaattaaaatacaggaattacctaatctataacccccaatttgttacttttgagtttgacacagcctattttcattgacctcaaaataaataaatgtacaattgaatacacacattcattctaacaaaacttctctttaatctttccttttaaaaactccatcttggttagatgttagattttcattgaaacagttttctctctacatttaaaaaagtgtttagaaagaactcttcattcaaattgcttccaagatctctttctaaaacccaaatttgatcatggtatcattctgtttaaaattcgttagagtaaacaaatgtattgttttgaacagcagctacaacagaaaatttgtcaatagatctcatagcacataaaatttcaaaatcgtcaaatatgccagtctcaatttcagcctaatcacaaattacagacttgcaatttcttgcatttctggaatactagcatagcctccttaattcctctgttttgggggatacacacaaagctagaatgcttgtgacatgcatggtacagcttccttctggccaacaaattagtgtagttcctagacagttaatctaaatggaaaacctttcctgatttcttttcttccctactcaagatctgggtgttacttcacatgtgttcaattcagaccctctccccatcatgactatccaactcaacaaacttaaatatttttgtttgcttgttttagccttgctttccctaactagactgtaggttacctgaagatggcaatatatactcctataccaccattgaattattgctacttaggacaggatctggctcacagatatttgctagtatatatttgataattaaataaagcatggctaatttggatttcatcatagttgcctagggactagtattgaggcttaccttggcttagtgaacctttccccacagttaatgcaaaattaatattataaataagattatacagagaatatttaaacgcttaagagaatgaacttttcaaaacccctcaagtactttataagcatcaatttacatataaataattgatatgctaattataatttagccatatttgttcattaatactgggtccttaaggattctactaggcatggattgaatgacaaaatcatgttaacttagtttgtgtgcctacacatattagagataaattaaaaagcatctccttaaagaatgccctaattcaaataatgttatcaaaattaaaatggccttttcaaatacttaaattaattttgtaagtattgttttacttcactttaggagttcaatacattcttttttccatttttttttactttaattagatacaagatattttacaagtcaatcccagttccctctccctcccctgctcccctactactcccccaactaaaaccctacctatcacataacctttctgccccacagggagggtgaggccttccatagggggtcttcaggatctgtcatatcctttgggatagggcctaggcccaccccgtgtatcttggctcagggagtatccctctatgtggaatgggctcccaaagtccacacctatgatagagttaagtactgatctactactaccggaggccttctggatttctgaggtctcctcactgacacccaggttcctgaggtctgcatcagtcccatgctggtttcccagctatcagtctggatcaatacattcttatttaaaggttcaaaacaaattcacagagggtattggtagagacattttagtttatttcctatccattctgcctatgtattgtttcatgtccaagaactaactatagtgcctagttatatgaatttgtctttcttgaatgctgcaaagctcttcacagtttcatgttcttgaatgtgggactgctttttttctggaatagcctctgctaatgtttcatcatgaatttttccttcaactacaaaattgtacctctgaactcaaagagcatcacaaatttttgtagctacctaacacaattttaatttacattttctctgctgccacaacatttttcaggcatatattcatgtacttgttatataataactatatatttctgtctactccaattcgaaggaggcctttgaatgaaaagattacatctcattttcatctttctattttctagcatctaacgtttgatctggtacaaataaggcatatgtcgtttgggttttttctcctaaaagatatattgacgtcctgactgctggtctgtattcgtatcatcaatcagattttcttctgatgtaatcaagttaagatgaaaccatactggattcagatatatgcaaaacccaatgactgatgtctttatcagaagaaagtgatttggatgcagagaggaaaggtgatcatgtagtgaagaagatagagattagactcatacaaatgcaaatcaagaaatggcaagagttgtcgggaccagcagaaactaggagggaggcagagaatggattgtagtttagagttcccagaaggaccaaactggctgacatcttcacttctcttctcaagtattttaagtttgtggggatatattgcactgattctaaaaagctaaaacagcatccattagcttttattgatagaaaaaataaatggatgacaaataatagaggagatacttttccttagtaaaatatcttagtctgttgaatttagcaaagtgtctttccatgcccaccaagttctgtggtgttcagaatagtggagagttcctttataatcatcttgacatatttttaattacacagtgattctgtctggagggaagggcacagtcttaaaacacatagtagactgtttctaccactgggagcagggcggagttctcaaaggtgcagatgaatgattaaagatcacaaatatccagttaaaacagcttctccattatgggaaactctctttcaaaccatggctagagtactgtcacagtttgaatattaatggtcccacaaaagctaatgtctgaatgtttgctccctagccaatgacactggtttagaaggttatagaacctcaggaggtggggcctagctataacaagtaagtagttagggactgggccttgacgtttagcctgaccccaagattcttttgcttcctgtctactgtcaggacatgatcatttaccttatatatccactgccatggatggagtccagccatcctgccttcctcaccctgatatctcctaaaaccatgagctaaaaagtctctcttctcttaggttatttctgcatgtgtttcatcatactaatgaagaaagttactaactcaagtaatgttctctaccacgggctatatcacaattgagcctttatgcaaatgtgtagaatgtgattgttctaagacttatctaagagtgatttacaacagaaagcacagtgatggacacagtgaatccaaattagaagttacataagattttacttctctagtgatttcattatcatggcctttgctaaacaaacactgccattccttacaatcatataaaaggttgtttacaaaaggctttgacatacagtcttacagaaaattgacataaaatatcttttattcattttttcattaaaaattccttttctaccttactgtctattttctatgctgacactggaattttaagtttttatttgatgtccttctctttatctgtttctaatttccatatgcctttctcccacttgcccatttgtaactttagtctatcatatgcattgcaatggtgcatctgaaaaagtagttcagctatcatctttgtagctggtcctttcttctcatatccctcatttgaaagttgtacaatgaaaaaaaaaaacacaaaatcacaggtaaagtatagtgggaaattaccaatacggaatcaggtagaaatataagggtatttaatagggaaaagccttacttacagagcaacctagccagccagcgtggcagcagtctgtaccgcaagtacaaaagtgaaaccgaaagagaaacgcagtcccatgcaagtatcgctctacatcaccctgaccccgccctcatagcgtggtcaggcacacctttagccagcccctaagtaggtgtggctacagcttcccctacagtaaagagatatggcatttcttaaagttcaccaaatagagtctttcctgaagaatacagttatgctttatagccagtgggcatgcaaccattggtaggtactaaaatcagcaccataaggaagcaacagaattcagtaagatttataattttccttctttccagtgatgggttgaagtcaaaacagaagctgttgagcagtgacacctttaaaggccccaaatatatgtatttatgatgtatacactagaagcagagattgaaatgcgtcaaagacccatataccaatatctgaccagtaagtttcttaaaatagccacaggaaaggcttggcataaagcactttataatagtctgtctgtggacagatcctaacattgactctgagggaccaacagcagccttggtgagagatctctactgggctaatagtgggtctagaattgacccaagtgaaaaagtttgtgggccactgttgagacacaatgcatcatttgcttttatttttgtagtgagtacttaaatgcaatcatggagtttgtgtgaggaattagtctatatagatgtttccttattctttatgaaccccagaaatacatatttatctttgttctatatatgaagaaaatgagagagaaaagtcagatagcttatccaagtcatacatatactaatggcagaggagtcaaatttccaccatcacttctctataatccataatctaaccactattctatagtatctaagttgtccttatgtcagtgtgtgtgtgggtataatctcaatagggatgtgggaccttggccccattctctctctgtctgaatcctggtttattatatgagaccttgctctgatacctgttcctattcttgccatctaccattttaccaacgacaagctatcttttctttgatttgaacttcaaaattatggattgtgtaaatttttctcttttcaagttaaatgtcacaagtattttgtagtagtggcatgaagttgaatagtagggaccttaatgtttcttgcattttctttttaaaattttaaacagtttattttgtatacatgggatgctttgcccgtgcactacatgtgtgcctggtgtccttggaactcaggagagcgtattgcatcttgtgctactggagttacagatggttgtgaataaccaagtgggttccaaaaaccaaaactaggtcctttgcaggagtgacaagtgctcttactgctgagcaatctctctagaccttctcatattttcttaaaatccccttgcctttttcctaataattacttagagaattttaaaatcaggtacagaagagattaataatttgggtaaaatgtcaaaagcttcaatttttcattttagtgcaaactgggttatgctagatttggatattttctctcttgtcctgcctatttctgatttagacaactgctgggtacaggagaaaatcatgattaaaatgtcaattgtgtttgtacttaagggaagctatacaatttgtcattgtttagctataaaaatccttatcaatagaaaatatggaaaaatgtttggcttattggtaattttgtgatgtatgaatggcatccaatgctgatatatttaacaaggaaaaaacaaaatgctatgaaaatgttgtgaatatttaattatcttatttaggatggatcttaattagcatgtattttacagcaatacgtttcacatttttggcacatggtgatgagctgatgcatgtgtacggcacattatataatcacagttagaaacacacccagtgcatgaaatagtggaacagtacacatcctcatttcttattacaaacatggtgtttacgcatagtaaactgtagatctcttcaaatgcatatgttgaagccttgtccccaagcaccttataatgtgactttcaaaaagaaatctttcattacaaacattcttcagcactacagtgaattgtgctttataggaggaacagtgatatgtatatagttagagataatgtgtgccatagcataaaccatcaataatgcagtattaaattttaattagtattttgtgtgtggatatgtgcattgcctgcatatgtgtctgtgctctgggtgagtgcctggtgctcacagagattagaggaggaagccagattctcagggactggagttataggcaagtgtgaagtaccatgtatatgctgggaattgaaatctggtcctctggaagggtgctagtactcttaacacttgagccatttctccagcaccactattaatatttttgaagagcaagggcatgttatttgtatatatttgctcaatatagcattgttattctatttaaggtatgcaaattttacagcagaacagatgggggatatccttttgtatatatgtttctcttattggttgatgaataaaacactgattggtcagtagtcaggcaggaagtacaggtggggctactagatgaggagaattctgggaagaggatacagaccctgagccactagagagacaccatgtacctactgggaagataggatgccaggcattctccgggaagataaggccatgtataaatacatagattaatagttataggttaataattacaagagagctaaccagtaagaagcctaatcattgggcaaaaagtttctaattaatataagcctctgtgtgtttatttgggactaaacctcagtgggaccaagcaggagagaaaactccgactacacagaaccatttcacatttaactaaagatgggtaagagatatggtaactaaatatagcatgtgatctaggactttttcttttgttgtgaaggatattaggataattcatgattttaactaagtctacagattaattttatcaatgttgataaatttacataaaataatgcttatttgaaaaaataaagtatatctacaccaaatctaacacttcattttctgtgatttcctttgatagtcacagtccaaaacaataaataaaaaattccatgaacaaaccattgctaaatcgtaaactgtaatgagtcaaagtaatacagtaaaatctcatgccatctctctccatgcatgttttgaatgttatgttttaatattattcactattgtgaattttttactagactaatttataaatttcttaaaggtaagcatacatgagaagcaaagtagtatgtatatagtgtagtactatagcctatggttttcattcattactggggtctttaaaaacatttccttttaggtaagagaggaatgcataaggcaggaaatttatttagacatccagaaaaagataaccttgtgcatatgtatataaacaaagaaaagatatcaaaatgttaacattttggaaaacaagatgaatggcatctaaaactcgggattatttttatataaatctaaatttcttgaaaatattcagaaatagaataccttatggttgtacatattaggttacttcaaactttataacacacacatacacatgctctagcaagaatattaaaatgtaagttttatatgaaactttaatttctaagatgcatgtgagagtcgattaagcccaaataccaaaagcatttagggaagccagtatattacaaagtggatcacagtaaggtgaacaaaagcaaactgaaacaaagtgcattaacaatcacaaaatggaatggattagaagtgttttaaaattagttttcttctaaaagttagtataaatatttagtcaccatttggctttaaggcacaaagaagttagcaaatttctgaaataatttttttcaaataagaaacaatagaatgtactatttctgttgcagagaagttagttctttgttaggaaacatcttcagtttttgttatgacaaaacccctgcgaaagcctatagagttagagtaatattagtatactaattaaataaacacatattgatgtactcatatgaagataggttatcttaatcgttgacatatcattattttctgagtttttgagacagggtttctctgtctttggaggttgtcctggaactagctcttgtagaccaggctggtctcgaactcacagagatccgcctgcgtctgcctccctagtgctgggatttaagacatgtgccaccaccacccagccctgacagatgattttttacattaaaaagatctatttatttttgtttatgggcatttgcctatttctgtgtatatgtaccatgtgcctgcatagttcctgagaaagctagaagagggcatcagatctcctgtaactagagttccagatgtctgcaagctgtcctctgggtgctcggaactaaatttcggtcctctaaaagaacagtaagtgttcttaaccactaaatcatctctgtcactgcaatgtttgctcttgaaactattgtattctctagtatacagatttttttttttactttcttggactggacagagcatttatagttaagacagtcaaacatttctgaaaaggaagtcttagcttgttctgatgtgccatgtgcctgtgtacacatgacttttacagatgattttaagttatcttgcacagataatgcaggcaaaattacacatgacaaatacatagaaccattcacaggaaataagccaaataatgcactttgttccaaaagcacttcgagcttagacatactgttgttatttaatcccaaatgcccacaatccttgaacattcaattaaattagatgagaaaactgggccatgtcactgagcgatagagccctttcatgattaaaaaaaagcaacatggcttacataactgtcctgacatgtcatccatattaggcaaaggccaactctgctctgcagaatgtatttaaagagtcacaaaattagaactcacaacaaagggtctcctgaaaaatcacaattatatagtattggtcaggtttgtggcaatacaatcagaagagaaggacaaatgctcttaatttatgtagctatatccttgtggatattccttcttcccagaaagaagtgatttctatttgtcatctgtgctgacaatgcttcttataaagggtcaaagaccatctaacaaagaggcatgaaaagccctctttgaaaatgtggtacatttacacagtggagtactactcagcaataaaaacaaaccaaaaactaatgacatcttgaaattcacaggcacatggatggaactaaaccatcctgagtgaggtaacccagacagagaaagacaaacatggtatatactcacttataagtggatattagacatagagcaaaggataaccagcctaaaatctacaatcccagaaaatctgggaaacaaggaggaccctaagagagacatacatggccctgcaagaaggggaaagggacaagatctcttgagtcaattgggagcacagggggactggggtgggaggtaggagaaagaagaggcaccatgaaagcctccaacagaaggagcaaccaaaagtcctacccagctatgatgtctatgaataatcatgacatacaataatatgtaatataataatacagcatgataaccctaagtgtacagtagtggcatgcataccttggtagtaaccaacagctctctaaatggactgtagagccattcagcaagagggaatttatggctgggactggaaagctaggcaactacccagggccataaagtcatggatgttggagaagagcctacagctttcccttttcccaaatcattctaatccctaagtacattcaaaacagttgtcctcatacccacaagtaagtataaacctcactcctcatcaaggaaactactctttgcaacagagatcattacagaaatctacaaccaattgcaattcaggggtgagaagaccagtcccaaaagctgtttctacaacacaactctcatattcaaggctcagggatcactgctgacaagagaacagaaagatagtaagagccagaaaaaacggggagtttgctgtgagatcatgtctcttaggaatttcagaagctacatccataaagtattaccaatatgatttggaaacataagctgaacaagaacaaccacacacatgctaaagtagcttgcagaaagaccacaaagcctcacctctccataactacaggcaactaagaaatgctgaaaacaagggaaatagtctttcccagggaagaacatgcaaattggttatccaatacaaatggtcagccctgaagacctatatacaagataacattatacagaaaggtgtgatctctgtgttcaggtatttagaacatgtggattaactcagccattttgcaggggccactgtaacacttccactgttattggttaggcaagcgcaatacacaataattgatgaataaattaattgccacacatttataaaataatgcaatggttttgtggaagcaaatattggaatgttgcaaacagaaatgaaacatggaattaccaaaatactaacaaagaaagcaccagcattaaagttatttatttaaaagaagccattggtcatcagcatctactctaaatagcagcttaaaggagaggcttaggtagaaatccaagcagcatctatgccaaataggaggcatgctggccatctttttaatagcatttgaagcaaaagatgacagatttgtctgacaactgtcaaatatccacaagtgactatctctctaccacttgtcctatcctatgttaaggaagaaaagccttgcgccatcactgcgctagtgtatcttgtagtcattactcctttgtacatcaaagtctttgtggctaggttgtttttttaaaaaaaattattctctcatatattacatcccaaacacagtttttcatctgttaaaaatatggacatcatgaaattgtaggcaaatgcatggaactagaaaataatcatcctgagggagataaccaagacccagaaagacaaacatagtatgtactagcttataagtgattagtaattgtaaagtaaaagacaatcattctacagcccacagacctagagaggctaagtaacaaggaaaatttaaggggggagtacacaaagatatctctgggaagggggaaatacaatagatttcatggctgttttggttctttcatttctcttttggtagcatgcacagaacactcgtgtatcaaagatgctggaatataggggtgaaggctctttgtaggcaccagattgacttttccatgtttaatgagttgtgtaagtgttgctttcagcaatgggtccttgctgtcagtttgtggaaagcaatctattgtcttggtaacagcctgagttgtttggggattccattgggacccctttggccaataactcaactagatataacccaatcctgtactaagcagagagtgagagaccttcgagcactcagtcttaaatgtgaggtttccatcaaagccctcccctccgattttatagaacctagtagaataaaaggtgcaaagtgtgttaagagacagagggaatgtagaacactatcaaaaaagccctctaaaatcaacatgaccaaagtgcacatgaagtcacagagactgaggcagcatgcacagagcctgcatgtgtctgtacaatgcaggttatagagctaaacagagaagtgaacacattcccccatccctaacccagaagctatctccaactgataaccacttgcaaatgaaactcgactttctcccaaaggagagtcactggggaaacaaaaagactcttaagtgtagactgcataccctgcagtagattgccaacaaacagaaaaggaactcaatggcagctctggaagtttcttgcctctatttgacatctttgggcacttcttttattttttatttttctttttctttttcttttcttctcctctctctctctctctctctctctctctctctctcttctctctcttcttctctcctttctccctcgctctctgattttataggttctttgtgtatacattatgttttcctgtttagtacataaacccctgggtctcttatttcttgtgacttctcttaggccattttacttctgtttgttttgtccaattctgatgtgttagttttgtgttttatttttatcccttagaaacccatctgctttctaatgagagacagaaagggggtaaaataagataggaggggagttggggagaagctgggaggagtagaaggaggagaaactataatcaggatatattgtctgagaaaaatctgtttccaataaattttttaaaaagaaagcaaatgttgaacaaaagaaaggtttaaagttagccagataaaagtgtacacatccagggaggagtctaagctagttatgggtatatctgagctagagagaaagcaatctcttcagttgtcctacaagtttaagtggagatgaaatggacattaacaagatttgcataaacatggagaaaagatagcacttacaagtgttcagatctttctgactggggtccttaagttgagatctcattctgaagtgcaaagtaaaatgttggttgcgctacatgagtgaataacatgcacattcaaaaacttagtacagaaggtagttctggatagaaaataatttggagctgtgtgtctaccaactcctcttcaattacaaagtaagagagtaattcagtgtttggggaaacatgtgcctctgagtaacatacatgaaaacatacaacagaaccacacaaaaagagatacacttgccatcttcctcactgaaaatgtgattataatggttcattccctagtgataggccatctcttacagcagctaaatgcacatgatggaagctgcctaagaataaaaggagtgagtagagagagaaaatccacaaaatttttatgcctatttatcagtgtctctcaactctttatactttcaaaggactttaaatttgagatcagggtacagttatgtgtagtggacactaaactccaagagctacattttattagtgtgataaaagatagcctctctatggcaattatgaatcagtttttctttgatatgaagtacctgtgatctttatcaccaatttagacaacaaaattcaattgagaggatatagggcaggggggggctttaattttagggcaacaatcctacgtaaatctcattcaaatctatttttgttaatgttattgtgcacagatttcttttccctcaatttccagactcaaacatttggattatccatacattaggaatcattagaatttgtgaattttcttgaacttaatgaaaacagatttcccccagtactgcaaaagaactatacccttccattttaatctagttaaaaggggaagagatattaaaaagtaaagaccaagttctaaattcaatctattcttttcttatccattaaggctaagttgaaaattggatatccaatttactaccaagagggtattcaaatatttctgctcaatcccttattgcttctaaattcactcaaaggcaagattattaattctttctgacataaaatcaagatttaatgagtagctgacagcccttaggaattataagaaaatttaatatgatacttttgactaaataatgtgcttttacatatatgagaaacacataatgcaaagtaatggacatgttgatttagctgctaaattctgattgtgattaattttaaaagaatatatattatctatatgcaaaactgtatctatagaaagctcctcttttccaatattttcatctgttgtatacattgtggcagacaatattttcttgtattcatcttcaaatcaacagttattttgagttttgtactaaatgcagggtattttaggccataaaacaaaatgatgcttgcgtttttctgagttcaaactgagtgaactgcaaagaatatataaaattatagtatgattcaaagaaaaattaatgtggagttcaagaggaacaaagagaaataagattgaacttcagggtgagtgaggggaatggtctgtttaatcagacgaaaagtgaacatgaaggcaagcatgtttgcaataagccttgaaaactaaactgcaaagagtgaaaatgatgagtgaaggcatccaggtgggaaaggcaaggtatagtaacagaaaagagcatgattaatctgggtgagataaatagcactgtgtacatgaaagggatagtgagaaatttagataggaaagatctacctaaggtcatgccaataagacactgtatacaaccagaacctgggagcaatctagatgtctctcaactgaagaatgaatggggaaaatgtggtgcatttatacaatggagtactactcaggagaaaaataaacaatggaatcttgaaattcacaggcaaatggatggaactagaagaaaccatcctgagtgaggtaacccagtcacaaaaagacaaacatggtatgtactcactcatacacggatttcagacatagagcaaaggattaccagcctacaatccacagtgctagagaagctaggaaacaaggaggaccctaagagagacatacatggtcccctggagaaggtgaaaggaacaagatctcctgagctaattgggagcatgggggagagggagctagaagaaagagaaggggagaagaggaggtatgaggaggacatgaaggagcaggaaggttgagtcaggggaagaagagaggaaagcaagataagagataccataatagagggagccattataagtctaaagagaaatctgacactagggaaatgtccagagatctacaaggatgatcccaacaaacaatctaagcaataatggagaggctaccttaaatgcccttctctgataatgagattgatgactacctcatatgccatcttagagccttcacccagtagctgatgggagcagaagaagatacccacagctaaacactgagctgaactctggaatccagctgcagagagggaggagtgatgagcaaggggtcaagactaggctggagaaacccacagaaacagctgacctgaacaaggggagctcatggaccccagactggtagctgggaaaccagcataggactgtactagaccccctgaaggaggatgtcagtttggaggtctggttaatctgtggggcctctagtagtacatcagtatttatccgaaatacagtaatggatttgggagcccattccacacagagggttactctctcagcctagacacgggggtgggggagtgggggaggacctaggccctgcttcaaatgacatgacagactttaaaaatcctccatgtaaggcctcaccttccctggggagtaggggaggggagtaggggagggagagggaactgggattgacatgtaaaagaaacttgtttctaatttaaataaaaattactttaaaaagacactgtatacataactaattggtttatagtcaaccacctagtgcttttcttaccaactagattttgacatcctcagggatagagagagtttatatgtgtttgctattcccgtggtagcaagcacactgtcgtagtcagtgttctattgctgtgaacagacagcatgaccaaggcaactcttatgaaagagcatttagttggggctggcttacaatttcagaggtttaatgtattatcattatagtgggggtggaggggcaggcatgggactagagaattagatgagtgctacatcctgatccacaagcaaggagaaagaggaagggggagggagggagagagagaatatgaatatgaatatgaatatgccttgcctctgtgtgagcttttgaaacctccaagcccatcaaccccagtgacacacttcctccaacaaggcttcaccttcccacttcctaaccctttcaacaagttccactccctggtgactaaacattcaaatacatgagcccatgggagccattcttattcaaaccactacacataccatacttggatacacagtaaaagtggaataaaatctcaagaaaatgaagagatgtcaaaattattttttgatgggtcttacttttcccctatattttcttgagcctttctcttaacgcttctttaaaaataaactttaaatggcctgtgcatgatgaggcatgactggccgctaatccaatgattctgcagctgttagagtccaacctagaagaatggctctgctaaactcaaagagtatatacagcaaaagctgttcaagtaatattgttaggtgcattttataggaaaactgacttttagtcagtaaaaatgacatggcttaagtgatttctgtataggttttttgcttttaggtagcctccatagggaaccaacatcaaaactagaattgttgtagaaaaatgaaattgtagcaacacgtatcctgtgcattatttggtttctggtttctagctatataggaaatggtaacaatctataaatcgtgtatagttgagggtaatggcaattgaatcgtattttttggagtcagtctacataatggttaacatggcatataaaataatatgcacttaactatgtgttgcattgattttcatcttctactaactgatttcctgggaagaagacatgttttatatgcttgaatgggacttaaataattcttaaccagtttctctctatccagtcaagagccaattgtttctctgagcattagagggagtgggagcatgttaattgttaacagcttgataggaaagggtacctcttgtgattctgataaattaaataaaatgtgaagtaatctctttctatatcaagggtgagcagttcacttgcaaagaacattcaacaattactacagcaaatcagcaaacaatttacatttaaggttagtaataaataaatcatatggcctctgacccccacaggcatgcggtgcttagtgaatgaacaaaatatacatatttctcattatgagcagttttaagagattaacataagccaagatagctaaaacatgttaaatagaggctctattaagagtacaagaaagtgctggaaacatggtgaaacagtatttgctgaacatgacagggtcactgcacacttgaacacacactgtctgtgactacatatgcatgacctgcacaagattaagccagccaaatctcagcgcagttgggggaggtactcatgaaagcccacgcctcgctgaggaactactggcaactggggtagggatcatcagttttcttcagcgatgaggcccttgaggctactcatgctccaagagatggtctcacaccagtgcacagtagccagcactaaggagtgtcagggtttttgttttgttttgttttttaagagacaacatcaagttgtgagggaaaagttgtgttggggataggtgaggaattggaagggggagagaacagaagtggatttgatcaaaaccgttatatgtatgtatggaattctcaaacaatgaaaaagagattgtacaaatgaattagtctcagactatgctaaattttatatgacattattttatagtacttaaattcggtaacagtagatctggacacatattatgtgagttactcctatctagaaggagaatcaacctttgtggaagactttgaccaacagaatgtagcacaagtgacattgtgggacttttgatccaggcctccagagagcctgtttctatctttttggattcttttgaacactgtgtttgccatgcaactgcttgagtgtccgtcttcttaggctgcaaaatttgatagttgggttgctagcctcaactaagtaatagacatatgacaaatgctatgctaaatctgtccgtgtacaatctgaagactgcaattgtataagtggctttaggtgatagcaaatgctcgaactgtagtcatttatgccattatattttggcaatttgttgtactacggtagctaatggatcttgtctcatagcagttttgcttcttgattcttcattcttcttgatgggggatggccttctgtatgttgtgaattaatgtttctcttattggttggtgaataaatgctgatcggccagtagccaggcaggaaggataggctgagctaccagactatgaatgctgggaagaggaagacaaaaacggatccgccagggaggagccatgtagctgccaaaggagtaacatgctggagcattacaggtaaggcacagccttgtggcaatatatagtttaatagaaatgggttaataattaagagaaatgagccactagccaaacagtttctaatttatataagtctctgtgtgtttattaatagaatcctctgtgtgtatttgggactaaatggctgtgggtccaggtggaacagaaattccggctttacttcctggtctctcttgctacttctttctattgtttatctttgcctctgcatatttaccctgtatttcttggctactaaaaaacttctctactgtcttcttgaacatatatcatacttttgttactgagtataatatatatgattgaaattaatacaataaatttttattcctggatctacaaggacataatcatcactacaaactgtcctagagacagattatgatacctgtggccatatgtcacagatatgtaagagtatatgaaagtgcaatggtctaaaatttcactaagaaagacacatttagaagttttgtttctttagaccatgattacatgtaatgaatcaccttttctgagctgttactaaggatgaagtatagtaagtaatttacaaacaaaccagtaaaccactatagctatgtgtacttatttatacatgatgtgaagatgataaatgtaattcttttcagttcttctttcctgaaattctgggatttagcatttattactaagtaagttctaatatcaacagcaacagcttggggcttgtcatattatgttgagtctaccaaaaagcctgaagcataataaaatggattattaaactagtttgtcaacatgttctaggagacctcatttctcccattgcaatgtggtctcacaccacttatagggtaaaagaaacttgtagtgcccatggtggtcctaaatggtaatttaaacatttgtattttggttcctttttagcagaacatagaaaatacagggtgaacatccttgatttaaaataaaaaagactttgaattggccaaaaaaaaaaaaccagaaaattttcaagtgcctgtggtgatattttgtttgtgctgtaacaaataaagcttgtctgaagatcagagtgaggagccagccacactgtttagccacagaggccaggcagtggtggtacacacctttaatcctagcacttgggagacagaggcagacagatctttctaagtccaaggctaccctgggctatacaagaatgaatcagtctaaaagggaaacagagctcatgactttgatctcagcacttgggatcacatgtctttaatcccagcactagggaggtagagatgggagtgatatggctaggtggaaagaggaatatatatggtgggaggagacaggagctcagagcattcaggctgaggattcatagggataggctggcccctttggtctgaggattcagtagaggaaagaggtctctcttgtggctggctcctttacctctctgacctttcagcatttaccccaatatctgactctgggtttttattattaagacctactagacctacaagtgccagcacagaatcctcatgtgacatgtcacaatcaaaacataagcacactaaaatattgtatgaaattactttcatactgtgcaaatgaggtaggaaacaaaacatcaggagtttcatatttagaactgtgtcctatccctgtgatattttatgatatatataccagatataaatgtccccaaaatctaaaacctgagatttgttgttctaaacattttatataagggacattccatatgtaggtcctctttagaattagacaagtatatttacctctatttttgtgactatgctccctaattatcttcttgtatggggattataaaagagaactaactctacaaagcaatcaacctagatagccttgacatgtgtgcatgcttgcacatgtgcacatatacacatgctcacatacacagagacatgctcaggaaaaaatacacacatgtgtgagtacacattgtacaaaccatatacaaactatgtagaaaaaaagaaaagcactgcttctcagtagatcatctgcttcccatctcaagtatatgatgatatagacatatagaactattcaaattactttgagatatgacaaagaaaatagtgagtcactaaggtggtgcccataatcattagacctaccctgttttcatattgcatgtgatatacaggccagagtaattgtaaagatgacttaagacagcactttagctttcctctgtggtatgaatttggttttccttctccaggcttcagtcatgataccacatttttttcttggtgaaatcataatgatttctctccagtgtacataaagttcaattcatcccaattataacatatttaatgcaaatgtttcagtggcaaagtgctgctcacccaggtgtgtattcaagtgtattggaacccttgctaaatacacttagctctcttcttagcttctagactcatttttttctgtaatttccttagcttcagaaacaaattttgagattgacaagtatagagaggaaatgtcatggtaggttgaggggttaggaggatgagccatttttattataggtacaaagtagtttatctgtctcattcccctgcttatgctcaataactctggtccttgtgtaatgtgctatccttctcgttccctcacacatacatgtcctcaagagagattactgaatatatatccctgttagcaatttgaatgtagtcttaggaacaaatacttaaaagcttgaggttggtgatagcaaactgtacatttaaaatacacaaaaaatctgaaatatcaatcagacttcttaaaactgaaaagcaaaccgggcgttggtggcacacgcctttaatcccagcactggggaggcagaggcaggcagatctctgtgagttccaggccagcctagtctccggagcgagtgtcaggataggctccaaagctacacagagaaaccctgtctcgaaaaaccaaaaaaaaaaaaaaaaaaaaaaaactgaaaaacaaatatgatttcaaatatgccttgcagatactactatttacttaatattaacatgatgaacattaccagaaaattctagttaaaaaaaaaattccgatcacaatctgacatcttattgcaactccttgtaaggagtttccagttggagtttcaattgagtatagttcactgttcaattaaacacactgtcccagttaggatctctactgctgtgaataaacactatggccaaaagtaacttggggaggaaatgtttgtttggcttagactttcatatcactgttcatcattggaagaagtcaggacaggagctcaaacacggcaggaacctggaggcaggagctgattcagaggccatggcggggtgttgcttactaacttactccccatagtttgctcaccctgtgttcttctagaacgcaggaccaccagcccagatgcggtaccatcataatgggctgtcaatcactaattgagaaaatcccctaaggcttgcctacagttcaatcttatggaggcattttctccatgaaggctccctcctctcagatgactataacttatattaagttgacaaaaaactagcaaacacacacacacacacacacacacacacacacacacacacacacacacacacacacacacgcacttctttatgtaggagcagaaaacaggacaaaggtaaataaaataacagaaaattgtgctcattcatgcaaaacttaaattgtaaaatttctcactcggatcctctccatgattcactgtagctcatctatatctattctggatcttgaatggagtgactttgagcaaatatttgctaatgccaacagcatattgagtgtgacaaggataaaagacaagcattgtctttagggatcttaggctcctcgagcagatggataagcagctaatgctgcttaaattaatgcttttggaagacaaaacactttggatctggtagcatttactccctcattttcttcatcgatagatgatcttaaataaatggggatggggcaaacatgaaatctataccataatgtatggatgcaatttcctcatttggtagagacagtataaaaagtaaaaaaaggtataagatttctctaattgaccctttcgttctatgtagctgccccaaacatggtctcaagtcaaaattaacatcaattaaggaaaattatacctctaatgttgaggatcttaattcccattatgcgtgcatgtgtgttacatagtctacatacccatctccaacaaggaagtcttaactcacataccatgcttgctgttttttcttgtggtattgctttacatctcaattattcttccttccccaaatgacagaggctcaaacccatcttaaaactgaatgaatctctagagaattccaaatgtgaagatataaattttctaggatttggttttcaaaaccatcaatacattttaagtcactatcaagaaaagcaaacataggctctattgttttaagtcagaattaatcactcctttttatccattagagaaccttaggccttctgcagaggcctttatgtaaagagatctactccaatcagaattgaaaatactgaaaatttcaggttactatatgtcttactaccattactatagctaagacagaacacggagtggggaggagtggattacctttgattactgacagatacttttggcaactgaacaattttttgataagctacatataaaagtatatggtatttaaaatatttttttatttttcaagtgtgtgcctgagtgcatgtacatgcaggagcctgtggaggtcagaggatatgtctgatcccctggaactggagttacagagggttgtgagctgtcatgtgggtactggaaatcaaactggggtcctctggaagggcagtcagttctcttaggcactgagccatctcttcagccacaacacttaatttctaaattttagttttgattggattacaatcttggttatcaaatacatcgattttatcatcaaaagtttttaaatgcctgtgggcaataaatgtaaaaaacaaaagtaaaactaaacccaagctgattagatactgattaatctcagtagtaccaaagggcagaatgcagaatcctcacaaggagtaaatttctttatttgttatttcagagatggatctacttagatagaaatctaccacaaagggaaagtcaattttgtttatcttcacttttgactttatttgagagggactttctggctagcacagcatccttttcaatttgtttcggtataatgtgcagcagatatgcttgattaatgaactgattagcaactttgttaattatttttccagtggtttttcattatcagagctactgtgaatcttttaagttactcttctttagttgtggcagtccgaaattttaacagtatgttggcttttataaaacaatggtatggacagaaaatatgacaaatattcatttcaaaatagaatcctaagaagatccgtcttatatatcaatcgtatgtatgcttcatttctctaaatgtcataaatatatgggattagggattacaaagcttttatagcattctattactgttacagttatggagaaaaatctcagattttactaacaattcaaaaattttaagccatgttatatatagaattcacagaaatgaaacagctgacaacttagtataaagataaaaaaccaaagtggatattgaaggtgctctttgtgttaatcagtcattgtgaccgtaacaaattacctccaaaactcagtgccttaaagtatgtccacatatctgtctctctgtctatctatggtttttttcaagatagtttctctgtatagctctgaacttgctctgtaggccagcctagtcttgaactcacagagatctgcttgcctctgcctcctgaatactgggattaaaggcatgtgccaccactgctaggccaagtatgtccattcttattttaatctattatgaacctgtgttcaactaaggtgctattttttgccataaggtctatgagcttgcattaaaagttacagcttgggagatgtctcaatggttgaattgcttgccacacaagattgaggacatggaatttggatctccaggacccatgcaagttcttggtagctatatcagatatagataaattagatcacatgtgtgtgtgtgtgtgtgtgtgtgtgtgtgtgtgtgtgtgtgttaataatgctaacatatgttaatatgttactggtatgtataatgctaacaagtcacagttcacaaaaatgctaaatttatttttcattaaaaagtaaaatggctatttatggaggatgctaaacgatgattaaactttttaaagtcaattagtaaaattagggccattgagatggctcagtggataaaggcacttggcatacatgcctgaaggagaaaaccaatgcttcaaaaattttctctgaccttcacatatacactgtggcactcctttccatcattccaatgcagttaaaaacaacaaccacaacaacagacctacaacaacaaaattagggctgttgccatgaacagaagttacctttagcacactaaatttataaaatttgtaataattattaaaatctttcattaaaattctgatgtgatttttgagacatggattctctgtgtaaccacataggcagtcctggaatttactctgtggaccaggatggccttgaattcatagaaatccacctgtttctgcctcctgaatgctaggattaaaggcatgcactactacaacctggcttaatattgatataattttaatgtttcattatgatgtcaaaaatctcctttgtaattccaggacattttttttaaataacaacaaaaaattcagtaacattaataaatatttagtatgatttataaaatgatactcaagtttgaaattttttttggtttttcaagacatggtttctctgtgtagctttggagcctatcctggcactcactctgtagaccaggctggcttagaactcatagagaaccgcctgcctctgcctcccgagtgctaggtttaaaggtgtgcgccaccaatgcctggctcaagtttgaaattttaagtaagaatttgaacaacatgtaaaagtagaaaagaaagaacagaatatataaattagattactaaatgaaggaggtagcagttatagacatgggaaagaaaagaattgaaagctataaagtaaatatatccagaagaaagtaaggtgattgaaaactttagaattgattcattaaagcagttagatgtattttgatgttttacacaagtaatgaaattgtgtctatacttatttgaagtacaattttcttgagaatatatacatagcttagaggagatgtacttatacagctcatcttaattgaattagaatggatatgttgagtggatacaggtcactgtgattccagagaaaaatctcctttgctacaacgctgttaaagggaatcaactgaattctttaaaaaattaccagaataaattattgtttttgttttctgttctaaaagaaattaacataagattactcaaaaccattgtaaagattggttcagaaaagaatcattgagttggcacaaagcaatatatttacatggttttaaagggcctccccatggattgttaattagttggagaggggatatagtccctataaagtggaagtatctagggacaaccttatcatcaccagtgagggacagagagacatagtgtgcttacagacgtgaatccctaaggatggtgtttgcctatgtagtgttctaggtaggaatacatgacaaattaatcatgaaagaaatgcaaattgatatgctgtatatatggtaaccaagcaggttttctatgtttaacaatgtgatgcagtcccacaattcttcttgcttcttgaaaaaataaaattttaagtggattgatggcagactgaaaaggcctacatgtaaatgcaatgcataacactaggctggatgctgtattggaacagtagctataaccggagcacaggcaactgagtaagtgaatgtgttgattactgacagatttcctgaattggccaacttactattattaccctagagactaatcccacacttaggaaatagtcaatgaagtaattaagggcaaagggattcaaaaatataaatgttgtccaatatatagaactaattatatctattcattttctgttatcaacaacataattccactgactagggatattataaaaaaagaagtttacttttgctcatggttttcaaggttcatagtctaaggcttcgtctgctgatggttgacttatgggcagtgaaggcaagacacgtggagcacaagctggggtagctatcctagtatctaacaaattagacttcaaactaaaagagatgaagaagggcatttcatattcatcacaggaaaaatccatcaggaagaagtctcaattctaaacatctatgccccaaatacaaaggcaccaacatttgtaaaagaaacattattaaaactcaaatcacaaataagacctcacacagttatagtgggagacttcaacaccccactctcaccactccacaggaccaccagacagaaacttaacaaagagacaaaggaactaacagaagttatgacccaattgggattaacagacatctatagaattttccatccaaacacaaaagaatataccttcttttcagcatcacatggaaccctctcataaattgaccacatactcaggaacatagcaaacctcaacaggtacaaaaaatggaataaccccctgtgtcttatcagaccaccataccttaaagtcagaattcaaaaacaacacaaattgcagaaaacctaccaactcatagaaattgaacaacatgcaatttcaccattcctgggtcaatgaagaaagaaagaaagaaagaaagaaagaaagaaagaaagaaagaaagaaagaaagaaagaaaagacttcctagaattcaatgaaaatgaagaaacaacatcccctaacttatgggacactttgaaagcagtactaagaggaaagttcatagctctaagtgctcacatgaagaatctagagaacagtcacaccagagagttgaaatcacagctgaaagctctagaacaaacggaagcaaattcaccctggaggagtagactccaggaaataatcaaactgagggcataaatcaataaagttgaaacaaaaaaattcaaagaatcaatgtaacaaacagttggttcttcaagagaatcaacaagatacacaaacctttatccaaactaaccaaaagacacagagagaacatgcaaattaacaaaatcagaaatgaaaagggggacataacagtggacactgaggaaatccagagaatctccaggtcacactttgaaaactgtactccacaaaattggaaaattcaaaggaaatggacaattttctggacagatattacttaccaaaattgaatcaagaagaggaaagcaacttaaacagacctataacctctaaggaaacagaagcagtcgtcaaaagtctcccaaccaaaaaaagcccaggtccaggtggcttcagtgcagaattctaccagaaattctaagaagagataataccagtactcctcaaattgttccacatgatagaagcagaaggttcattgccaaactcttttttaccaggctacaattaccttggtacccaagccacacaaagacacaactaagaaagagaactacagaccaatatccctcatgaacattgattcaaaaatactcaataaaatactggcaaaacaaatccaagaacatatcagaaaaatcatccaccatgatcaagtaggtttcatccctgggatgcagggttggttcaatattcgaaaaatctatcaatgtaatctacatataaaccaactgaagaagaaaaaccacatgatcatctcactagatgctgaaaaagcctttgataaaatccaacacctcttcatgataaaggtcctggagagatcaggaataacaggaacatacctgaacataataaaacaatatacagtaagccaatagccaatcaaactaaatggagagaaactcaaagctattcctctaaaatcaggaacaagacaagggtgtccactctctccatatctctccaatattgtccttgaagttctagctagagcaataagacaacaaaaggagatcaagtggatacaaactggaaaggaagaactcaagctttcactgcttgcagatgatatgatagtctacataagtgaaccaaaaaactctaccagggaactcctacagctggtaacaccttcagcaaagtggcaagatacaagagtaattaaaataaatcagtagccctattatatatggaggataaatgtactgagaaagagatcagagaaacatcaccctttacaattgccacagacaacataaaatactttggggtaatgttaaccaaaaaagtgaaagacctgtatcataagaattttgagtctttaaagaaagtaattaacgaagataccagaaaatggaaggatagcccatcttcttggataggtaggatcaacatagtaaaaacggtaatcttgccagaagcaatctacagattcaatgcaatccccatcaaaattgcatctgtatgtcgattcaattctcttttcaagaccccaggattcagtcctggcacttgaccttattgaacttatctaatcctaatcactttctaaagtcctcacctctaaccataatatgttaactttccattctcgatgcatcacagtggggattaattctcaatgcccaatattttttaggggggaggcaccgatactatagcaaaggtgatcccagtgagaacgtatacaagaatattcactattctcttaccttgtttgaaaatttgtaaagttatttcaaaacaaaacattaagatataacaatgagttttgggaacccagtctagagggcttaccaactaaaataaaagtgactagtcattgaacacagcaggtatcttctatagctcactctactaaaagaaaactgtttgccctctgaacatgtacaaagtctgaggagaggctctacctctggacaaggaagaactggtttcttaacatggggtttatttcattcaaagcaagtagaaagcgtctttatgtgtttaagatggtttctgaagtatgtttgtgatttttacttaggctatagtcacttggtacaattcttcaaacacaatcacaagagagaaatagcccagaattaaaggtgcccatactcttggatttatgtttgtttnnnnnnnnnnnnnnnnnnnnnnnnnnnnnnnnnnnnnnnnnnnnnnnagctgcttgctggcagagtcacttgttttgtttcaaatcggctttctgcccaatgtggggtagaaacctcttttggaggatgacagtgagccacaattcaagttgaaatcagatttagtgacacaactttggcctagactagaatgcaaaacgaagtggagacattttacagctcaccatactgcccctgcattcacttggaaaaaaagtgttccaaagcattgatgccagcttttcagaaatattatagtagtaaaaactgtgacaccagtaatagttgtgccaagcatgggtcttattttagtaagttgtttacctatgccaacattgaagtgtgcttctgtgcaaaaagatgtggataatagttctctttatagaaaaatcaatgtaccccaatagtcataaaatataactgtgtgtacatgtacatgcattgtgcaagtacaaatagatctgcattgtgccagatgtgatctgatcatactggaagttctatttaggtatgtgatattaaaaactgctgaacagaactttttctttagagcaaagccatacatttcacattaccactggcaaattttatttgacatgtaattttaaaatgaagttactctaatctaaagtaatagtgcaacaacacggataagcaatgaagcctttcataggacaaaatggattttaaaattctagagagttttagttacaagtaattagaaacgcaatttagagcacttaaaatgcatttctttcaatggttaattacattataacagccattgtttcaaatagtgatggactaataaattgtaataatcacttctgtaaaaattgaattgcaatgttttaataggcagtttacatgactagagaaacctctttccccaacactggaaatttccttcagtatagaactacttacacagatacatacagatatctgcacataacagattaaatatggcttgctaaacacagtgggccgctgaaaggcattttaattgtgtgtatgctgtgtgtgtcttgtctttaaaaattcaggtggtagaatgggttttaccagaatatctgttacttctaaaaataatcttagctttataaaggtgcggcaggtctgttttcaggctccaaccttctaatctacaaatgtggttcttttttcttttataaataatgagaagacaggataggagagggaaatggcggccatagggagaagacataccagatggaaatgagaatcaaagtaaaatagaacaggaaggaagaggaagagaaggggtgggggttgaggaatagggaatgaagaacagggtaagggggtgagaatgaaggggaaagaggaaaggaaatccccatatttttgaaggctgccaaagtcacttgggtagttcctgtggtcactccgtggtagacagtcctgaccatttgtttctccagtctggagaagacttgactttgctgttcagtcactttctgcttgactagtgtgccatagtacattaagtgagaatgtgtccaacacctaaaggtaaaaactaccaagtgcccaattcattgctctactcctccaaatgtttaggaactgttcccctttaagcactgcactgacaacctcattcgtttttccctcccacaccctgtgagatagctgaaatctctgctgacttctcagtaccatggaccccagatcagcaaatgcaacaaagggaaatttcatgcctcattttcacacagctctctttacttgcgagtttaacttttcaggctttggctggcttggcaactttctgatgccttgaaacagaatttgtcttttatttggattgtgtggatgttctgccaccagttcctacatggttgccaaaagtagaaatgtactctggctatgatacccaccctttactattctctctgggctttctgtcatgtaattgagtcttacatattattttctctgataggaacatttgcctatcaattcatttgtcttgtttcactcctacacatcattcaatatcatttttgtatgctctcagacacatggagtttctgttttaaacacacagagccttattgcaatgttcaagctgttttacaactcttggatacaagggattctcccatctcaacttctaaagaacatggaactacaagtgtgtataacctaaaacagaattaggaaaatttcctgtacatgctattgttagtaggacctccacattaacgtatcacaactcactcccatttcttatttacctttttgtnnnnnnnnnnnnnnnnnnnnnnnnnnnntcaagcaaattagaatagagacaatatgaagttattaaagtattctcagtactgtacttctaagcactcaacgctgcctggaagtgacatttttattgaaagaatggtgggcaataagctggtgaacagcaaacagtattaaatggccggcccagtgttgtgtctttcctctcttcttctttgcatagtaaccactctatcacatctggataatttgagtaagtcaagctacctcatggtttcatactttcctcaagtaaaaatcaatatgaataaaacagaaatgaaaattaccaaattctttccaagaataccaatggaagattccactagtaatgtgaagaaataaaaggttttctatgtttctctgtgaatcaaaatttcacatcttccttgtggcacacaactttaacattttccttactattccatgatctgtcccattctaccagaaaaaagcaaatacatatattctacctcagttaaggcaagcttggtagtttagcctttcctcctgatacaatctctagtacctcaaccaagcctatcaaatttctttcaacttttgtacacacacaccccccaaaacaagaacctacctacttcagatggggttagtttggaatgctaaaatgtatattatttatctgtcatatttgtatatgtcttctctgcaaaattttattttggcaccatgtcaaagtgcctttaacatcctcccttgttttatattgacggttatttggaaactaacctcaattacagtatagtagtcctatagtaaagcaattataagcaaaaaagaaaactaaaattcacaagttttaacattcattgaactatgacagaatatgagtcacttaaagttcactagataaaaaaatgaatccttttttgagaatctgttttctcatactaccactgaaagtgagcatgcaaaattttcttatttgatggtatcctttttgttttattagcagtgcctcagaaatgtttgtccctgattcagtgcagaagtccgtatttcagtgacatgactggcaatctgtgggaagctagctacattgctaaccacatttatagcattgcttctgtgggaaaatgcattctggattccaatcaactaatatccaaaaaactttccctgcttgaataatcaggattcaaatgttaatatgccctacatctccaacaatatgccttataagtcacttgtaagatggggactgtctgtatttgaaaatctcatgctagtctattattcttcactaggaagaaaatcgttggacaatgaggtttcatgcctgaatttttcttcctcattttatattgcatttctccagtctatcaaattagattcatgtaaatcctatcaaaaattctgtcagtacaacagatgctctatttttaatcttttaaaaataattttcgaaatgtaagataccagttaaatattcaggttacagaaacctctcaataattacactaatcatactcttagaatcaagtagatgtattgaggcagatgttttctttccacaattctacttaatgaattttaagtttttcttctgctagcatcaactaccactgtggtgtggcattgcctaccagcattaattagcctaggagcagctgaggagaaaaaagacaatgactacttctgaggttgaggctgcaaagacaggagcaatggaaagatgggtggtaattaatgaaaagtgaccctgagtatagagctgaaatggctgatggcaaatcatagttctatgggaatcaaatggccctgaggtacaaggtggaatgtgatacaggtttagaacatctacacggaaaagcataaggaagatgtgtctgtgtttaaagaaggggtttttagagtacatacataatttagattaccctaaaggggaaaatagtgtagaaagagatgaatgttgggcatggtgacatacgtctgttatccccaaactcttaatgtgagacaagaggtcacaagtttaagacctacctagatgatatagtgagattctgacagcttcctccagagaagaaacacagagagagagggggggcagggagggagggtgagagggagagacagagacagagagagagacagagagacagagagagacagagacagagagagagacagagagacagagagagacagagacagagacaaagagacagagaaacagaaagacaaactcagagaaaggtagagggagacagacagaaacacacacaaataggggggagagagacagaaagatagaaacacatataaataaggaggaagggacagagggaaggatggaggaaaagagagagtggggatggagggagggaggaaaggagaaagagagggagggagggagggagggaggcagggagaaaattcgatttggggtccctggatctaggcagtcaaggaacagcctgagttaaagctcactcctgagggtttgaactgaggaaacagctcttttattctagaggtggagaaggtagtaggaatgctaggcattgctttcttttataaatagcttgaagactggccccctacttccattctcatagattcagcaagaacagattatatcctaagaccccccacaacagtggtattttgttcttcagttggatggggttatttagtattacccttgaaatcagctccatgctcagagtcaccatcatctgtctaatgtatgctctgcatgactgtttcaaggatgtttgtagaggctatgatctgctcaggggaagaagagctttcttagagaaaaccacacactcctgcttgaggtcattcttattaggaaaggtctgacaaggctccactgatactaactcaatctgccattctagagtacaaccatgtgtggatgaacatgaacttctctgcatagtccaaaatatgagatgactgccagagacctggtttttttacattgatcaaggtcgtatttatgcactggaagagcttcaattcctaagcttctttattgcagtcatgggaattaggtccacacacagtggttcatataaagaacccagaatttcttatcaaaaatatttaaaatatagcccagataagaagcattttgtctatctcaagatagtatttgtatcagcaatatcttaacaatgacatcataccaaatgtattgtaatatctgattatatgtgaaatgttaggttacaagactactaccatttttatgtgtaaagtaggaaatacgttattttaatattgcacatcaaatgcaccctttctttgaagtttgttttttttgtttattcatctgtccatttattcaaacatgtctgaaatgcttaagttccaaataacataactaattctgtatctactcagataaataagacatggtgttacctgtgggctcacactgtaacacaaaagacacgtaggggaaaataatccaaacaaacaaaaatcctgaaccagccaaccaaaaataacatacaaaccaacactgaggagtgattgagtcaaataactttaaattttaaggatgggtttattgaaagataataagggggcactctaggcagagacatgaatgaattagagaaaagactggaaactaggaggctgttctgaagattggcacagaagtcttggcagaagaaggtgagatggaattagggggctgtagattttcactgctgtattaaaaagtgaatgggtataacacattaagtgattctcatgggtagcaggaagaacaggggctgaaggtggaaactggtgactagggatattagaaggaactgaaagaatatgaaattgcaacaatgaggagaaataaggaggtatcagaaaaaatagggaaagtgtggttttctagaataatactgacacttaactttgtggagaaacctacaaacgattgggacattcatttacgagtgttcatcacagcactagaaatggccaagctgtacagctcaagcagactaattacgaatatggcaaatactagaaatggttgccagacactttgatgggcaccaggaagtctttaggtacctagaagagttaggtgtctttttctcattaagttgccctttcaggaggaggccccgctaatgaagaaataatcatatgagaatttgaacagaccctaagaatcaaagaaagatggagtaatgacatggggaggggcactatcctatggttttacattaaggcctaattaattctaattaaatccaaaaaaagatttctttatttgtgtgtgtgtatatgtatctgttcaagtatctgtctgtgtttgagcacatgtacgccccccccacacacacacaatagtactaatgtcttagcactgaagtagagaccagaagaaggtgtcaggtgtcctcctgccctctttcatcagtacagcatattcctttgagacagggtctttcctttaacccagcccacatttttttcaactaggctagaagccagcaaagatagagatcctgttgtctttgcctccctcggagttgtggttataggaggaatgcctggtttgttatgtggatgctgctagctgaaattcagtacttaagattgttcaggaagggctcttaaccactgagctatctctccagcacaaaagtctaattaattcttatttttcacataaacactatttgaaattttataaaatacaacatgcaagataaatgttggcgtcaactagggagaactgtaatagtatcaatagcttaaaatatttttaatgtaacttagaaaataaaaacaaccctaacagtataaattggaagtgacagctgctattataagtactattttttaatgagtaaatcttgttttgaaaatgtcctaaattcatttgaacgaataaaattcctcacccctcctcaatttttgcctaaagttgagggtgggtttgacaagagaaattatgttatgacatagcttccacaaagtgaatcctggtagctgtagaagcagaggcagtaatttcccttggcaggcagtattattaacagtgctggcatcttttggctaattggaattccaaaggacaaagataactacttaaataaaataggattatgaactggaattgatacgaatgaaatgttcagtctatttaatcttggtcattatctccggcttgtatctgaggttagttagacttctttcaaatcatttctatacatattagaaaggacaaggattgtagctacgggtcagggacaaagaattcccctgtgaatctctttatttgtagctgctttcaataaccttgtgttggggtaagcatggaactgtaaagagacacaagagaggaaagcattccaattttccaccaatttgattgcaaagttcaacaggcagtaagaacaaaagttttagaagaaaagcctcctcccttgtctctatgttgaaatgaattactgttctccactgaagcccttcgagacaggtatgactcagccatctctgctttctctgggatctccaaaggcatgagagggagcagcaacacttcagataataaagtaggcagaccttgctataacatggtatgagaagctcaaaagccttgtgttctttacttgtgaacaccagtttcatttccttgggctcgtgactgttaacaaaagtccactaaggagactgataacttgtgaacaaaatctccatttctctaaatnnnnnnnnnnnnnnnnnnnnnnnnnnnnnnnnnnnnnnnnnnnnnnnnnnnnnnnnnnnnnnnnnnnnnnnnnnnnnnnnnnnnnnnnnnnnnnnnnnnnnnnnnnnnnnaatatgcttactgttcacaatacagccatagttcccttctcctaaccagagcaagagcaagtcatattaatgaagaatacaaagggtaaaaacaatggcatattttaactcaatattcagtaaaccctagtaacccaattttgctcctctgaaatatggaacttggctaactaaattgctaatgaaagcagtcatgatttttttgagacagggtttttttgtagcctttgatatcctgaaactagttctgtagagcaggctggcctcgaactcacagagatccttcaaattctgcctcctgagtgctgggattaaaaacatgtgctaccaccacccagttgcaggcatggtttttaaccacacgcagtttaaattagagtttagaagtatttgatgactgaatgccacatagacatgttacacagacattttaaaaaagagtctatatactatcaaagatgaattcaagaccacatgaagctcagatttaacacaggcatggatacaaacactctttgggtatacttctaatcctttaaactatgatatttcaggatagagaaaatggagaggtaatcagagaaatgtggttctagtgataattttttaactaaacacatgaaactgcagaaatctgaaatcatcatgaagaacaagtgataatgaaagcaccctggtttatttctataaatttccatgattattgcatctgtatgcaaatagcttatttaggcacatagagttattagttgcaaaatcttacaaagcttcttaattagttctagggttaacattctcagttcacttataatgaaagacagatatacacaatgctggtgctcaataaatacaaggacaattaagattttataacttgctagaagtatctgacaatttccccttctctgaactagggatatagttcacccaactttggagatgtaaaaagtcaagcaatatccatgggggacaaagcagggtaaagagtaggaagaagacaaattccagaatatatatttgtacattttcacctctaacagttttagctcattccacattttataataaggtaccatagattcagtggcttataaaaaaaacaaaaatttatttatttgtggaagctgagaagttcaagtaaagtaccaggagtgttaaatagaggcctgcttcctcacagactataccttcttaccatattgtcatatggtagaaaaggacaaaacctgcactacctccattcctaatgggaacagaaatacaccacagaaagtgttacttaattacatcaaaactgatctcagtcaaggcatccctgccccatggaacaagtgaccatgaagaacattttgttcttgagaataatcctgttctttgtcttctgttctaaactgcattaattttttcagatataggggttatagaacataacacatcttcctttctgattttgctttaacaaagttcagagctaaatttaaagttcaatagtagtaactattcttaatttgcaagttttgagtaactgtctgaaagtcttttataacttttattttcccacttttttgttaacttgatgaaatcttttgggaagatggagaggtgataaatgcacacaggaagaaaaggaagcaggtagcccacctgccaatccacattccttggataaaaggaggcagggaagctatcttgaccctctagaattgaaattggggataattgaaacaatgaaaaaccagctctcacaattaagattttataacttgctagaagtatctgagaatttccccttctctgaactaaggatatagttcacccaactttggagatgtaatcaatgtatattcatgaccggaaaatttcagtagaaataaattaactttgaggaattattatacatatgtatctgtaaagacactgttattatgtgagaaaaactgtaagtgctaactaggagcagaacacagagcacaatacagaagataaaatcagtgtctttaaccactactggtgaactacacggagaaacaaaatcagaatagaaaaataaataatgctaatagtgcagaaaatgaaacactcaaaaactctttgaagttactgagttttagctgagtttttatttcaattattattttcaatcggaaaacatgacaattagaagaaggtctactgattgtggtgatatattgtttatgatttaataacacttgcctggagatcagagtgcaaagcctgccacactatttagccatagactgaggcaggggtggtatatacctttaatcacaggactcaggagacagaggcagatgaatttctgtgagtccaagaccacccagggctacgggagagtgaatcagtctaaaagagtaatagatctcatgcctttaatcccagcactagaaaggtatataaggaagaagcaaaaggtctcatgtgagattcagtttccagtcacagggaagacacgatctccatttcagccttggtagaggtaagatctactggctaactgctttgcttctctgctcttccggcaagctttattaaatcataaacaatatatcaccacaacagacagtaactctatactctattttatataagatcaggtatctaaagccagttcaggtgcgaaagccagttcagactacttcatttttgctttcaatgatatacattgtatgccttacttacaaaaaaattactatctctataacaggaaatagtgtttgtttggtgaatgaatttccaagttcccctttagtctggaacactggagaaaggagggcgaaagagtatgtgcaaagaacaaaagctgtccaatgagctgtagaaaaataaacagcaaataagttatctgacaaatactgatagatgggaatcttagcctgtgtttgaataatagcccctgttgaaaactataggcttcctttccaatcatgaccacaagtggatctcatgttcatgggtatactgagggatgctggactagtatttctttacactttacattttaaagccacttaacatgttttacagaagatataacatctagcctgagaacacaaaatttggcagagctgtcttctagcccattattgcagccatagtggactcataatacatctattacttgtttcagggaggctacccacgaatgctatttttagaacagagatgttataggtgtaagcagagggatgactaagataacactacaataaatctctttggaacataagagacttctgattgggggcatccctctttcagtttatgaggtctgggaaaaactacttacatttactgggtataagtaaggagcatatgtatatcgctgaaggcaaaaatgaatgtggcctggcctggatttaccacctgaaactgcatcattcaaaattggaacttatgatgtttaattctttttataggtattgggtattagatagccagctctcaattatccaggctaatggagaggaacagtctcatggctaataataaatagcaaataatccagacattatttgtgtagatttggaaagacactttaaaatcagaacgtaacttggaggtctgagtcactatccaggaagatcagacattgagccagcatcaggggtcttgaggtccagagcacactcactctaagaattctcaaatcattatttgtcctcctcctggaaggcatgcagctattttctcagctagagagaaaaagcttaagaattggaagggcagaagggccctggaggactgtagcaaaacaagtgtctgatttcgtattttctcactggggagtttccctggttacttagactgaagttgccttcacttgtgttctaatccacggagacgtccatggtgtgcaaaaccacccagactaaatggaaaccactgagaagaaaacattgtatatggacttgaaaactactgaaaggacagagaactctgcatcatgttttctagtaggggttaataaaatgtcaagcctttgtcagggttctgtaccatttctatttttctgtatgttcttcctacagcaattccagttttagcactacatgtaaacaatgctactgagtttagatctgtgtgagaaaaaaaaatgagtctttaaaataatggccagctggtgacatcatcgctcaggaggctgaggcaggaagatgaagagtcagagccacttctgagctacagcgagtttaccccacctccaaactgtacataaaatgcatgggaaaaagcacttgagagtgtatgtcattgtgcatgttattgcagttcttcttattaaaaatgagagactaaatagaaagaaatacagtaaaatcactcactgggtactagaatctatgccaggctccatggcagtgagttggactttttatccatttacagtttaagacaaacttgatggtgctcgagccacaaggttctcacttatatgatttgccatacagtatttcattccagggccagcaggcattggccccacacatatgccattcattttcagcaccacttgaatttgcaggtgagcagttttattttcagagagttccactactagagctaacatcttgtttactgtgtaagagacacctattccagggtctgatgtgcatcagccttgggaggtctaactctgcatttggctctatataacatgattttgtagttctgacaccagccatatgttcaagctccgaaaaaattatattttttcctgcagggcttcctttaataaaaacagggctggaggaatgcagagatgatgtttgtaaatagatttttaaaaatcataaggcatattggattctgagaaattccaggaatatgcctcagtgaagtcctagctgctcagtgtgttaagcttctcagatgaaatcaataagcttcaggttatattagcaatacattttaatactaattttattaaaatgttgttgctcctcttaatttccttgcatacagtttgtctttaaagctggaagaaacaatcatcagtttgtccaaaagaaaaaaaaaaaacaaaccaaacaacaaaaaaacaaacccatgcattcagcctccctcctgcattgggccacatcagtgacatttaggcttataggctaaagagaaacccacaaacaccaccttgcagcaacatacacaatctgaattgttcatctttattttttctgaataatttttttggcttttgagaaagggtttctctgtgtagcttcatagggtggtgcagtgatggcacacacttttaatatcagctcttgggaggcagaggcaggtagatctttgtgagttcatggccagcctggtctacaaagctacacagataattttttcaaaggaaaacagcatcattacaagctctagaacatactgttgtaaaatgtcaacaggatgcaactttcttctgtgtgaccaaagtgaatgggcaaatttagcacattcaagagccccacaatgattctgtaaaacctcgaaggaccaaggcaagatgtggatgaatgaggatcatagtaggaaccatgttggaaaaaatttttttaaataaaagatgcagtgctgtgcctaatggccctggcctgtaatcctagccactttggagattcatgtaggagcattgtaaactgaatgcctgtaatggtgaaaaggcaagttaaatgtcaaaccagacagcttagtaaggaaaaaatatccttatctctgaagacacgaggtcaatgaaaataatccgcacaaataggccctgcccagaagtcctacttagtattattacttttgtccaaccatatatttccacaatgaacttcttatccaacacaggtttttgttctttggatgtatgaagtctactatatcaagtaaaacttagaattattaaatacattagtgtgcttttattaatttatgttttggtaaagcatccaagctatgagaccaccatgcagaaaagaatttctgcctaagatataggaggaaagcatttgaaccgggatgatggaagactgctttgctcaaatacaagttctgtgctaaagttagactaaaaatatatattgctttttcattgttatctaactttgtcacatcctccaaagggaatctctgtaaattgtaaagtttgataagtatgagctatctacctgagttcacaaaactaagccatggttttagatgatatggctttctaatgtaaagatttcatatgtattaaccccaggtaggagaggatgtttgtaggagcaagaagtgcaattcaagggacagcacacgtggagttgcttatgtttcacagaattctttaaagtgaaattcaggcaggtctattaaaatttctgtctgttctctacactagataagtaatctcattagttttggcaaaggtcaagaaacagaggaaatccatgcatacagtagtaacatgtctcagattctttcatttataattaagagactgtaactgcatgttaaagcttcattttgtcaactctaaacctatgcacggaatgaggaatgagcagcaattagattagcagcagtatgctagctacaacaggaagtgtattggagagtcatcggaagtagaacagtttcagtttaaaagggccttgttgcttcacagttcagaagcactgcagagctttggaatgtgctaagtttgcccattcactggagtcacacagaagaaagttgcatcctgctgtcattttataaacatttgctctatagctaaaagaagcaaactatttagaaatgcccaaagcctatcttgatgctgtttttttaaggactttaaaaataaaaagtcatgttatatttctttttggaccaaataactaatctgcttctatttttgaatgccaaaaagctagaacagtgtaagaaacccacttggtggtgaggaggccttatagaaagtgttagagcagaacactgatttgggtgggagcactgccatggagatcatagttcaatttatccctatcatctacggctcgttgaatcccacccctttcatttcttgtttccttaaaatctgccctgtctttccctcccctcttccactaacccatagtatcaaatgaccaactttaaagggttgtgtgctccatgaattaagtgcatgccctgcttagctattataatgttacccaattctgagtttaatgcaaaaagttatctttgaaagcaatgaaaaaggattacacctgaaatcaagcttcccaatggagaagtagaggagggacacattcatttattccttcaactgctctacacataaaatgatctctcttttaaaaaatgaattatttttatttgcattggtattttgcctgcatgtatgtctgtgtgagggtgtcatatcttgaagttaaagacaattatgagctgccatgtgggtgatggaaattgaaccatggtcctctggaagagcagtcagtgttcttaagtgctgagccatccatctctccagtccctaaaatgatgtcttattaaatgagtattactttgaaaaaatgcatagaatcaaaagtatttaagattactatttataaggatagataatcaggaccttataacaaataaaagttctttaagatgaaatattattattaaatatcaggggacgagtaagtagtattataagttttactccaaaaggtcatttaagagtctaagtaaaagattctttaatataagcatgtaacagcaattgatgtaaaaagaggccatgaactgagagagagcagggaagaaaggaagggatatatgatgcaattatattacaatctcaaaaaataaatgaaaaaattaaaaatttttgtactattaaattttatgcaaaatcatggcagtatcacgcaatattgaaatacgaattctatttatgactcattaatctaaaatacttgttgagaatgtgttatatgaggatgtgtggaaataactaagatgtatacttattctgtaaatacactgtacaaataaaatgtttactaacattacaacaaaggtcacgaaccctcttctaaaagcaaaaaacaaaaaaacacaagacagcgaatattttaggcaagcaagacagcgaatattttaggcaagagagccacaaatgttatttgttgaatattcttgattaagcacttatctttttatatgtctgaatgttacgaagaacattcctaggtctagtctgagtgcagtgactatagtttcttaactggtgatacactttatggtctagcacaaacatgagcacactgaatttgagttaagaaaagcaagtgtattcaaccagctgatctacatgtctgtattgaaaaggaatatgaaaacaaaaaagacagtatgattgatatcttcgaagaattgaaccataaggaacagacacaagtgaagaacagtatatgaagaatgaatggtaggctggagagatggctcagctgttaaaggctaggctcacaaccaaaaatagaagaatgaacggtagggttaagacatagaggaggaaagttggtgcccacaaagaaaatgatatttgcacaggtcttttaatgaaaaggagatcaaaagacttctttgtggaaatcaggtaattttggaactcatggatgaaatatgtagtcttctatacctataagaatccataaaccatgaaagaattatagcacatgctgaagcaacaattttaattctttttaactcagcatctaaaacagccaccggaaattctgaagcattgtgctgaaaattaacatgatgatgaattcatttttgtaacatacaaatgtcactatcaatgaaatgagggaagtaaagtattggaagcgtgacaaatctttgaaggctggttaactacagtcaaagtgatgctattaacaacaacaacaaaagagttgggagagacaaagaaccaaatagactcagcaattcattgaaagtctgataaacaggaaggacagagagaaatctgagggaaacttaaccttggaatttttatgcaaattaacatttttaagtatcaggtgtggagttggctttatactactgctcatttagattacaacaaattcagaagatttttaaaaaagaaacaactgtaattttgtggatatatttgaatgtgctaggattgatgagtgaagcaaagcattcaacctcatttgctgaatgatacttcagtgattgctatggcaggactgatgtttctgcattaaattctgcaaatgttcattctttgcaggacatcaaagtggattaaaaaaacacaatgaggatattgcctctatggctaacaactccatgatgtgcatttctgttgtgaggtatttgactacaccatgtaaagatacatcatcataattggtttaataaaaagctaaatggtcaatagctagtcaagaggtataggtgggacttttggacagagagagctctgagaagaagaaagggggagtcaccagatggatgtagaggaaacagggcatgcgggagaagcagtaaaagccatgagccacatgacagcatgtgcattaagagaaaccggttaatttaaattacgagcttgttagaaacaagcctaagctaaggccgagctttcataaattaacaagaagtctctatgtcattatttgggagctggtggaacaggcaacgattccttacacatttctatgaaaggagttgttcaatttttgttttccttcagtctgaggctaatctgcacaattgatgatgcttgtaatcctactcaaacagcagctgtctttgctactgtggaccctgagtgttggatttccccctctccatctcatatgatgatgaatgcccttttgttgcttccttctccctgtggagagtcaatactgtcagcagcatggcctaacatgactagtgtcataccccataatgataactattccaaagcatacatgacacagaaaagaaagggcagcagcagccacagaagtggcttactttgcaatgtacaaatcaagaattctttgatttgaaacacatccttgctcacagatgtctgagtttattataagcatgatcactttgtactctatcttccagatttccaattaagaaagatttttatggaaagcattttctcatattagactgattttgagccacagttctgacctgtttattatagtcatattgcctttacatgtgatacattttctaatatatcaacatgtctgttagtgattcattcttttagaagcaggtaaaaattgaatttcagttgtaagaaagaatgtggtggtctccacatgtcctctagtaacatgaagatatcccaaacttccaattgttgcatgttttactattactcagtttgttggggccaggggtggggacaaacaagcatgcacgggatttagatttctcttttccatttcacctggcatcacttctaacacagaaattgaccaagtaatagtcaattaggttgactgctgtcactgtacatgtgaaagaaacagtaagtatgggaactgcctcccaaaggcagctgcagtaggcaatgacttatttattacagagatttgtgtgcatgcaagaaaacagatctaggatgcttgcctgacagctgacttttatgaaaaggacattcgagagtgatgacactataaacttcctttgctactgtcccaataaataaataaatgaatagatagataaataaatggacctgtaaaggaacagaagttaaaatagtctatttacatgacacattttttcacaagtgttattggcttgagatggccaacaatcaggcagattaccccaaaattataacagactatattttatacatttttttaaaacagagtcaagaccaatcagaaattccaaaaaatcctaaaagacaaaacatctagaagacaagataaattatccagaagataagttggacaacaatctttctcaattcagtaaagcatttactaagtggcctaagatgcattcaacgattactatttgaactactttaagtgtattcattttccaagaatctagatataaaatacagtaaaactaccctgaatataagagaggtatatagtgttggttcaaaagacacttctgatcatcacactcttaaggtcattgttagatatgccagccatcattctgctgcagctatggaaatatgctggataacagatagttcttacatttcaggtgaagctacctaacagaggtgtcttatttattttgctaagagacattttgaaccagatttagtccataaaattagacttattacattttactttctttttccttaaaatggtattttgctaattgaaattttttattttatttttattttatgtgactgagtgtcttgcctgcatgtatgtaattatcccatgtgaatgtatgcttggtgcatacagaggccataagagagatcccctggaactggaattacagacgattgtaagccatgatgttgatgttgggaactcaacctgagtcctctgaagagcagaaaatgcacttaatcactgaaccatcttagtctcattttcgggttaatttttaaactttttctttttaaggatttctttcattactgtcttgggtttcctctattttctttctcatctgtatttttttatacctccatttgcatgtttttcctttcagtctgtccttcatcacaacagtaacaacaaaagcaataacacaatttccttctttttaagggaataagatatagttcgttttagagacattttaaataatcaaggctatatagaacagacttacattaaccaaaattccatattccaagatggaaacagtttcataaagctttatatttttaaagagcacagaaagtaataaatcaatgcaagtttaaaatacatttgtcagtacattagagaggaatgttcagagacaggggatacgtttttataggctcaagatgctagctgatgacattcttagcttttggatcagtggaaacttctggaatggtttgttaatggatacctaaggattttatctattagacagaagatgttattcccaacagagaggtgggcaaggagtccctttttaggggctaaagctattccaagataaggtgactagccctgggacctgcaacatttcacctttccacagtgctaaaattgtaatcagtcactcactctctgcagacacagttttgttccagcagtcgtcattcacagttctccctactgaccaagcattatatcttgtgcatgcaggggccacatattatttattaaacactacaaggtctctcatagctaagggggctcaattttaggatctcaggtagaagaggccaagtagtgggcattgtcctttaatttctttattgattccacaagcactctatctatggtttgtttttcttatttagattatttttttctgttaacttcttaaatcgctgctttcatcattatagtagataacaaaaagaaggcctaaatatgttcatatttaccattacctgaaatatagactagaaagtaagaaacctgagttctagtccctactgtcattagcttgcttatggtttccagtaaatgactgaaccctcccttaagcctggttttcatacataaaaggaagaacttgcatctgaagacctctaatagtcctttgtctctactaatcctcaacttcgacttgtcagacactatataggacaacaattatgtatgtcaatttgagtacacacaaaccgtactgtagaccttggattgtaagttgatcctattagtccataatatactaacttgttattattcctctactccagggtgttaggagtgtttctactcacagtctaaattttcaaggaaagagacaatttcttattgatctcagtatctctaataattactgcagttcttggaacttcttacatctattacataaactactcaatatcaatggatttctgccatcttagttaccaacaaagtctagtttcctgaatatgacagttttctgagaaaatggacagactgatgggaacaatactaactcaggacaagatcagacttactcataagggaatcaatatttacctcctaaaaaatttactagaacttactgctataattttatgtaaaaatgtactaactgcttatgtgatatcaatttcttttcctgtggaaaattgtgacacttggcgtacaaggtttgaaaaaaagacaatttctggagacatgaaaagaaagttacagaaatgataaaaattctaataacacatttccacccctagattccagaagaataaaaattactgctgtgacttacatttgcccctaactataagattttagttaaggggctctattaaaagaagttctcagagtcataggctgatcttgtaaagagcaaagagaaaatctccagacccattatagacctccaattaaaatactggtatttgtcttggccactttatttaaggagtatgcattctctgcatcttagattttatatttcaaacacttaatgatgattaattgtaaaggacacatgtaagagtagaatgtagctaaatgatgcatttgtaattcatgtgaaacaacataattagttctccaagggttcatcaatatattattctactaaacagaatacttgaaagtcccacttgagttttaaatgcaatatgaagcctttattttaagcatggcttcctctgtgtaatattctcataattattttccagcaacatgaaatattaggttgattatttttattctagctgttagcccctcatgctgtgaagaaagaaacttcatgaattcattcattcatttcaagacaaaactgaaatatttgggagtcataattaaaataagaaaatggggaaaagatcggatttcaaaataattatgggttagtaagttgaaggaaaataactaagttagtagtctatatttactaaaaggcaaaaatattcttgttgtctctaccgcaaatgtaaacaatatataaataaacagaagttagttttatgtaccaatttcgactcatggaaatgaattacaatcttctaatctacactgacatttttgtatatgctgtttaaaaaagccatattcctcattttgatatatgtcggtatgcagaagacaaactcctctttactctggatattatataaaaataatgtcattacatatttgttaaaattctctgattagttaatgagaaccatatagctgatgtatttttacaaatattttacacctgtctttagaaattgtacaacttggaatctatacagtgctgcttatactacagttgaaccaaatgatttgcttttgttaggcaagcattcctcctctgaactctagccttgaactacatagggcttttgataaaaggttggttaaggtcatttatctcccacctcttcttctgacttttggtaatataattttcatacgcttctgtctgtttttagaaaatacatgacctcaaagaatagtttacatttctgtgccatgccctgacaatgtggcaagtcctctaaaaagagaacttcaattggcaagaattatgccactggggatatacatgtaagatttctatccctgatgttgggatttgggaaaggatgacagggtgagagtatctgctaaactactctcaataacagacaatactcactcttagcatgaatcattttcatttagaaaatacaaggttgtaagaagaaaagaaaggaacatgcaactgaatccacaatgagaaggcaaagtgaatacctgatgtatctgtgcagaagtgggggaggaagatttaagaacatatttaagaatatatgttcaagtagtcccaaaattcacctacatgcaaagtgacaatgtatttataaaagaaccatatcaccatatatccaactgaagtcatttaaataagtaaataaaccatttcagaatgctacttttctgaacctttacaaaaaaaacaataaagtgtcattgaatggttgctgtgaaatcagagagtatgtcagtctacactatgtataacagctgtacttctattttgttaacacaaataatgagcagaaaagtactatgtaagaggagaaccttttcttagttaggctctttcttaggatatacaaactttggaaaaaatcagtctgccttgctaagtgagataacaacaaagctagggattggaattccctactctagaacacaatggaaagtttgtaccaattagcctcagaaactgaactggcctccttctgaaattccccttagaaagtgtctggcaaaatggcacatataagtagacatttatgtatcttttcttttcttttttttttgtttgtttttttgagacagagtttctctgtggctttggaggctgtcttggaactagctctgcagaccaggctggtttcaaactcacagagatctgcctgcctctacctcccgagtgctgggattaaaggcatgcgccaccggcatttattcatttcaatgagtcaaatttccccttccttaagagttacccccatggagggccttacccttcctagggagcagaggggggatgaggtgggtgggctggtggggttttagggggaggggagggacagggagaagggattgacatgtgaagaaggcttgtttctaatttgaactaataaaaaaataatttcttggggggggggggggggggggttcaaagaaatatccttgaggctgagcagagaccacactagttttgagggatataggaaagggttagatatcattctcagatagaaaaacaatgggcttcaggagaccaacttgaaagtcaaattatctatgttggactataatagctgtgggaatatatgaatggcaagtacctaaagattcaaatctaattaattaatttatcaattagtgtgtgtgcacatggatgtgtatgggtcacagtgcatgtgtggatggcatgtgtggtggtcacaagacaacttgcaggtgacaggtctttcctataagtatctttgcccactgagtcaatgcaggccccaacaacaattcaaaacacactacataagaaatctttttttttaagctatcactcatttttgcagtgactgggattccaaaccagggctttgtgaactatgagaaagtaccctatccctgggctataccatcagcctttaccaataatttttatacaacatagtaacaacagataaaatgagtattcactggaaacctctgagttgtggtcctaacaaatagctgccttatggtatcacagtttgcatatgaagcttcttctgaagcttcttcatgtattgaaagcattgtaacttgctggtgacactatttttggaggtcctggaaactttgagaaataggtcactgtcggttggaggtggagaatctgaggactgtatattgacctagctcctctctgtgtctgcccttcctgtttgccatgagatgagcagctactgctatatgctcccaccatcatgatgttcagccttctcacagcagctaaagactatggaatgaaaagttggaaactttgaaatctttactcccttacactattttcctcatgtatttgatcacaaagctgtaaagctaactaacctgatgttcctcagatcactggaagttgctctctgaaacagtaccatggccagccagtaggagggagagcaagagaaatttggtaagaacagtttgtgatgtcaattacatgacagcataggagaggcagtaggaaaacatacttattcgtgcttctggttaaaggtatattattcttctaataacaaaagaaaagtcaacacctagagattattcatttttgcctcataattagaccttaggtatccttcagagcctaagaatcaaaacatttcacttaattttcaaaatggcattccatcagaaatttagccaatatagaagtaataacaaggtatgttagagaagaaaacatgtagccaaacagttcccaggtgctagaatcatgagaaacagaactctaacaaaccattatgagaatgcttcactactttggatcagttagacatatctctgatgtacattggcttctgcattggtgaccaatcccttccccacttttaggcaaatacatgcttttctattctgtagacggtaccttttgacctctcatattagtaacccaattgctaatctacagcatttacccaatttgggaattttctctgggaaactgcttggcgcactttgagcctccgaaatctcagaaagatgacagacatattaatgtaaaaaggagagcagtgagttcattctttgggaagaaaatataaataactaaacatattgaataataaaaccagggcagccgaaccaccctgatggcaaagcaacaagagcagaggaaggtatgacagacatatgctcttgaagcatgatcacagatgtgtggttattgtttcaccaccagtggcttaaagacttccagtgcccatgttgtaagtggaacattctagtttggataaaaatggctgaaaaaatattgcaagagttctttcttaaccccacacccactaagaaacgctcatagctcatattggcctttgttctttgaaaatagaaaaacatcttttatacaatactaagcatctaaaacaaatcaaaagacaggatacaaagacaatactataaagaagatgatgaaagctccaaagtggttaatatggattatttcaaatgcttcagagagacagaagcatacaggaaccaggtcagagatcaagagcagagtccattcagtttctactttgtaatttctgaaagattatcaccagagatgataacttctcaggaataatatgttgttgaactcagaccaaatcctaaatcatccttagctataatactcaggggatgccgtactcagtttaattgccttcctccctttggacaaatcaatccaccctttctttcagtcaacaaatctcacaattttccatcttctttgaatgaattcagccaaaccaccgctggatagggtattgtttatatatccagcatgccagagatgggtaaactataatttaaagttgtagttttctgtgcagtttagaatttttaaatatgaataaagtattaggcctttaattttcaattatagaatatatgactcaattattttctaaggaaacattataatcaagaacttttcctaattaagttctaaggaattacttacccatggaggtaccaatttgtgcaagggttttacaagagaattaatctcattgtatcatatcttgtgaggataggaaactaaaacatagtatttatttatttctttttaaatacacgagtgagtttaagactgaaaaacagtagtaacacaagtcaaatttgtgttactcttcatctctataaaggtataatcctcctaccacttgtagtatctgcattctaccagtagcagcctggaatggtttctaccacgtaaatgcaatggtttatttatgtttctctggttctcagagggacagttcttgtttcctttaggtgtctttgttgctgtttctatggttcattgatacagagtgagcagtgatttacctatattttggctatttaacaggcaatgaattccaaatgtattggtctgataccatggcttagttacttattttttcctcgagaaaatagaaagatcaagatgtgtatctgtcattgggagtggttgctggctatcaaatctaagaattatgcatgcatagcacattcttcaccacaagaattgttttgaaaaccacaaagtttttatcagccctttcttctttagtcttctctcttattgctttgaatatatttcaaattttaaaatctaagattttattttctatcacatttattggtaaaacttaatatgttgttgtaagaattacagactgtcatcctatagccctaaaaggagtatttgttttttatattcggtcccaaactgtcatcacggaatcctgtcaatttcctaggtaccatttaaggtatgcccatttttttatttactttttactgtaatattgatggggagagggggaattccagatggccttttataaattagtcattcaaagagagaggccgacatttactcatataactcacataagaaaaagaaagttcccatttaaataacagtttgctgatgtcaacaaaatggtgacatagaaagccccaagcctagtccctgcctagaaaaaaattaataatatatcagcaaaacaacccatcttactgagaggaccaaaatgtagttacagtaatccagacgagcacaaaaccacaaacaattgtgttaaaccggtaaaaaaaaaaaatcttaaatttacctgtcagacaatcccccaaaccatcataactcagtactgaaatgtttccctatgtgtaagagaacaggaaacatgactacaactcactggccatttgctatactgaatgaagggtgtgtttctgtcttgtctcacatggagcacacagatgattatagctcaaatgtttggacttttaaaagggaatgaaagaaggacagctgcttactgtgttgatcatgagccttgaagactgaaggaaggtaccagagctgtgaataatcaaacagaatgtagagagagaagcagaacagacctccaccaactggctggtctgggctactacctgaggggttaattatgtctcacttcagatggagcactgagggaactggcatagctggatgggagacgataaaaaggaaggaaatggagctgcagtttttctgaaactagcattgccatacagcgggagaagtaggcagccaactcaaggtttctccacattggaagagaaaactcggaagatatgtgcttaaatagcctgcctccaaattccctatgactgagctacaccctgagttctaaacatatcatgcagcatctctaggatgtaaagatagtacaaaacacaccaaatgattcctgagagactgcccattaatagaaagaataaaaattacatgatcatcaagagaaagcattgataaaattcacaagaaggactctcaacaaactatatgtagaaggagttcacctcaccattaaaaaaggctatacataaaaagccctcatcaaaaccatatgcagtatggaaaactgagagcttttctcatcttgggaaaaaaaggcaaagatgcccatttccaaccctgactctcctgagatcgctgtgctattccggcccccaagcatgcagaggcaaattgaattgtcccctgagaaccaagcaacccagagtctactgacatctgtgccctagtcctgctcttgcctacctggagagcaagtgcctcagacacacctgcacacaccatcagacccatcagagtatcagagacaattgcacccacctgaagagaaccccagacccatacacaccaggaaaggaagagacaccacctgcacccactggaagaagagatgggaagacgacaatataagaacacatccaacaacaggaaaaccaatatgacaccaccagaatctagggactctacagcagcaagacctgaatatctcagttaaacagctgaaggaaacagttcaggacctgaaaaccgaaatagagacaataaagaaaacacaaactgagcgaatgctggaagtagaaaggctgagtaaacaatcaggaaccacagatgcaagcataaccaacagaatacaagagatggaagacagaatctcagacactgaagttaaactaaaggaaataaattcattaagcaaagaaaatcttaaatccagcaaatccttaacacaaaatatccaggaaaatatggacatccttgaaaagaccaaacctaaggaaaatagttatagaagaaggtgaagaaacccaactcaaaggtgcagaaaacatagtcaacaaaatcatagaagaaaactttaacaacctaaagaaagacgtgccactgaaagtacaagaatcctacagaacgccaaatagagtggaccacaaaagaaagtccccttgtcacataataattagaagaccaaatcctacagaataaagaaataatattaagagcagaaaaggaaaaaggccaagtaacatatgaatggaaaaaaaaagatattccacaacaaaaccagatttaaacaatatgcaaccactaatccagccctacagaaagtactggaaggaaaaccaaacctaaggaaattacactcacaaaagcataggcaattgataatcccactttacaaaaacccaaaagaaaagcagggtaaatccatatacaatatcactaccaacaataaatctaaaacacacaagaataaacactcaatggacctcaatttccctcaatattaatggtcttaactcgcatataaaaagacacaggctaacagattagatacaaagacagaatcgatccatctgctacatacaagaaacacctcaaattcaaagacagacattaccacagagtaaagtgttgggataagatacttcaatcaaatggacccaagaaacgagctgtggtagctatcctagtatcgaacaagttagacttcaagctaaaatcaatgaaaagagatgaagaaggtcatttcatattcatcacaggaaaaatccatcagaagaagtctcaattctaaacatttatgtcccaaatacaaaggcaccaacattcataaaagaaacattattaaaaatcaaatcacaaataagaccgtacacagttatactggaagatttcaacaccccactctcacaactccacaggaccaccagacagaaatttaacaaaaacacacaaaggaactaacagaagttatgacccaattgggattaacagacatctattgaactttccatccaaacacaaaaaatgtaccttcttttcagcatcacatggaaccttctcaaaaatcaaccacatactcagaaacagcaaacctcaacaggtacaaaaaaatcagaataacgtcctgtgtcttatcagaccaccatgctttaaatttagaattcaaaaacaacaccaattgaagaaaacctgccaactcatggaaattgaacaacacgcaatttcaccattcctgggtcaaggaagaaataaaggaagaaattaaagacttcctacaattcaatgaaaatgaagacacaatataccccaacttatggggcactttgaaagcagtactaagaggaaagttcatagctcttaagtcctcacatgaagaaactagagaatagtcacaccagagagttaacatcacagctgaaaattctagaacaaacagaagaaaggaggggtagatgccaggaaaaaatcaaactgagggcagaaatcaataaagttgaaacaaagaaaacaattcaaagaatcaatataacaaagagttggttcttcaagagaatcaacaagatagacacacctttatccaaactaaccaaaaggcagagagaggacatgcaaattaacaaaatcagaaatgaaaagggggacataacaacagacactgaggaaatccagagaatcttcaggtcatactttgaaaacctgtactccacaaaattggaaaacttaaagaaaatggacaattttctggaaagatatcacctaccaaaattgaatcaagaacagataagcaactaaaagacacctatatcctcctaggaaatagaagaagtcataaaaagtctcccaaccaaaacaagcccagggacagatagcttcagtgcagaattctaccagaaagtcaaagagagaataccaagtttcctcaaattgttccacacgatacaagcaaaaggttcatttccaaactctttacgaggctacaattaccttggtacccaagccacacaaagacacaactaagaaagagaactacagaccaatatccctcatgaacattgatgcaaaaatactcaataaaatactagcaaatcgattccaagaacatatcagaaaaatcatccaccatgatcaagtaggcttcatccctgggatgcagggttggttcaacattggaaaatctatcaatgcaatccaccatataaaccaactgaagaagaaaagccacataatcatctcactaaatgctgaaaaagactttgacaaatccaacaccccttcatgataaaggtcctgtagagaccaggaataacaggaatgtacctgaacataataaaaacaatatacagtaagccaacagccaacatcaaactaaatggggagaaactcaaagtgattcctctaaaatcaggaacaagataaggccgtctattctctccatatctcttcaatattgtccttgaagttctacctagagcaagaagacaacaaaaggagatcaagggaatgcaaattggaaaggaggaagtcaagatttcactgtttgcagatgatatgatcgtctaaataactgacccgaaaaactctatcagggaactccgaaagttgttatacaccttcagcaaactggtaggatacaagaataactcaaaaaaaatcagtagccctacaaaatcagatgaaaaatgcaatgagaaagaaatcagagaaatatcaccctttacaattgccacaaacaacataaaataccttggggtaacgctaaccaaaaaaagtgaaagacctttatcataaggattttgagtctttaaagaaagaaattaaagatgatactagaaagtggaaggatctcccatattcatggataggtaggatcaacatagtagaaattgcaatcttgccaaaagcaatctacagattcaatgcaatccccatcaaaatcgcagcacaattcttcacattacttgaaaacacaattctcaactttatatgaaaaaacaaaagacccaggatagccaaaacaaccttgtacaataaaagaacttccggaggcatcaccatccctgatttcaagctctattatagagctatagtcctgaaaacagcttggtattggcacaaatataaacaggcagatcaatggaatcgagttgaaaaccttgatattaacctgcccacctatgaatgcctgatttttgacaaagaagccaaagctatacaatggaataaagaaagcatcttcaacaaatgttgctggcatagctggatgctggcatgtagaagatcgcagatagatccatgtctatcgctatgcacaaaacttaagtcaaaatggatcaaagacctcaacataaacacagccacactgaagttattagaagagaaagtaggaaatacctttgaatgaattggtacaggggacctcttcctgaacataacaccagtagcacagacactgagatccacaattaacaaatgggacctcctgaaactgagaagcttctgtaaggcaaatgacacagtcaacaagacaaaatcacagtccacggattgggaaagatattcaccactccacacccaacagcgggccaatctccaaaatttacaaagaactcaagaaggtagtctccaaaacaccaaacaattcaattaaaaagtggggtacagaactaaataaacaatactctataaggaatctaaaatggctgaaagacacataagaaagtgttcaacatccttagccaacagggaaatgcaaatcaaaacaactctgagatatcatcttacccctctcagaatggccaaaataaaaaacaccaatgatagtttatgcaggagatgttgtagagaaaggggaacactcctccactgctggtgggagtgccaacttgtacagccactttggaaatcagtatggtgattcctcaggaaaatgggaatcagtctaccacaagatccagcaattccactcttaggcatatacccaaacgaagcacattcctacaacaagaacatctgttcaactatgttcatagcagcattatttgtaatagccagaacctggaaacaacctagatgcccctcaactgaagaatggatagagaaaatgtggtacatttatacaatggaatactattcagcagacaaaaaagcaatggaatcttgaaattcccaggcaaatggatggaactagaagaaaccattctgtgcgaggtaatccagtcacaaaaagacaagcatgatattttctcactgatatatggattttagacatagagtaaaggattgtcagcctgcggcccaggcttctggagaggctggtaaacaagaaggaccctaagagatacatacatggtcccccggagaaggggaaagggacaagatctcctgaacaaattaggagtatgggggaggggagagggaacttggagaatgagaaggggagaagcggaggggtgaggaaaacatgatgggatagggaggttgagttgggggaagaacagaagagagcaagataagagatactataatagagggagacattagaagtttaaagagaagtcaggcactagggaaatgcctggagagctacaaagatgacaccaaggaacaatctaagcaacagaggaaaggctaccttaaatgccctctcctgacaataagattgatgactaattcctatgccatcgtatagccttcatcccgcagctggtggaagtagaagcagacacccacagctaaaccttgaactggactgaaatccagatgcagagaaggaggactgatgagcaaagtggtccattccaggctggtgaaacccacagaaacagctgacttgaacaagggagaactcttggtcaccagactgatagctgggaaaaaagcatgggactgatccagaccccctgaatgtgggtgtcagtgaggagaccttggaaatctatggggcctcttgtactactggatcactacttattgctaccataggaatggactttaggagcgccatcccacatagagggatacttcctgagcctagacacaagggggttggcctagaccctatcccaaagaatatgacagactttgaagagccccctatggaaggactgaccctccctggggagcagaaagggtatggaataggtagggcgttagttggggggcaggggacaaggggagggagaaggatctgggattgacatgtaaaataattttctttctaataaaaaagaaaaaaagattaaggcattaactcctcttatatagtagaaacagagtgtacaaattgactccgatgtaggtgatggtaatatccttaaaaatataactagaagaaaggatttttaaacgtttctaccataaagaaacaatgtttgaggaggtggagagatggctcagtgattaagagtatgcactgctcctgcattgaatgtatgtttggggtctaccaggcattttgggcagctcaaagccacctataactccaaccccaggagatctgacaaattcttttgtacttcactagcatttacacacacacacacacacacacacacacacacacacacacacacacacacacacacacacacaggacaacccaaaaatgcacacatacactcataattaaaaatctcaaagaaatgatgttggaggagacagtgttccccatgacttctacattgggggacacacttgaaggacatattggtaacacccccctgctttctcattatcaggaagccagcaattctattctatcacatactttgagtcattatactctgcttcatcacaagtccaaagttataggttttaagtgacatggcctgaaacctctgaaactgtgaactcaaataaatatttctatcttttacagttgtgtatctcaggtacattgccatagtgatataaagctggctaacacaaagtgtttaaataccagttaacctctaggctgactttgtcattcatttctctatctctggactcccaagaagaaccatagaagagtggcgaaagggaggtcatattaaaaccataaatcactcacttcatctatagtaacaccagacgataaatttcagcaacacaaactataccagtgtgatgaggtacataattggaaagctgtttctcattagtcaaaactactcatttggctatgttatgaagcatgtaacaggaaatgaagtaagatctaagaaaaatgctgccatttccatcaacaattttgcttaaattactcagggtaacttgtgtatttcctttttttttcttttcttttagaaaaagaagtataaattggatgcagcttatttttcttgaaaagaaatgctgatctctatttagagcttaccaatagtattctttctgttttcttcctgtatacagaagagatgagcggggtgtgtgtggggggaagcaggggaaccttctgaagatattttttgtagaaatggtttcttgcaccttcaattacttcatggcaggtgcaatgactactctgtgctctctggaggacaaaagtggcattttgtacttacaaatatgtaactgtatcagtaaaaatgagaccatgctgaaaatttgccctgagacgtttaaagaacactgagctttgactaaaagttacctgtaagtcaatgccaaatgagaaattccaagtttcagaagttcagccattgatcagggaattggagtttccaagccacaaagctgtgtaaacatgcatcagtgcaatctggtcacctcaagcaaaaatcagccaggcacaacagtgctgaattctaattgcatctatttattttaacttcgtaggaaaatgagaatgctagcccagttaagaggtgataaactttcagacagactccacttgtttgtgtgatgccaactttataagtttgcctgtacatattgctacagttcttctcactccgaggatggaaagtagaagaaataagttcattctcagtttataaaataggacactgaaggtaagtgatttgatcggcacagcagaagtaggaaatgacaaaattagatgttttaagacttgcaaatctagggatctttttccattctaagctatgaagagagattctaaggctctgatgagtcagacaggttaatatttgatgaattacctttgggtgtgagacaggttctatggctagtcacactgaattatatctggtattcacaatatcactttgacatccggcattttcctctttgctcatcaactctactaccttcatggtctttaattacatattcacctatgaataatgtgcatatcttatttattacatacagttgctattaatgggtattctactctgtcctactaagcatgtgctattgttttcatttaagacaggtttattttcccattgtgtaaggtaaagtgatagacatgatttttaattttatgcattcatcaaggcatgaaagaatattgtccagattaatagactattgaattagaatttaatatctactttatgtggaagcaatatgaagaatcacagaaaataacctatttgtaaatcataaaagacaaacaatatcaataatattggctatgtattggtattataatcaccagctactgtgctaagttatttgtcttcattatctcatttaagtctcaaaacaactggattagatgaatattcttctatacattttatgcaaagaagccatgtttaagtgcaagtgggtaatttgcctaacttccaacaactagtgatgttgaaaaatggatgagaatctagtttgtctagttaaatactgctcttttaccactgtatcactgacactcaaaattcagtggtatctgaagaatgagctgaaatgcttgttaaaatataaactcctttttgctttatgctgcaatttagcagatctttcttgggtgcactctaagatttttaattttcatagcacagcaggtaattcttatactgattttgtgtgtgtgtgtgtgtgtgtgtgtgtgtgtgtgtgatggacattgagaaatactgccatatattacagtgacacaactaacacttttatctccatagtaatttcaaatgagtcattttaaagcaaataatacttttgagggtctcttttattctctggttctctctctctctctctctctctctctctctctctctctccacacacacacacacacacacacacacacacacaaaattgttcggtttttaagttcataaagctcgctgtatcactgtagttgagaacttgaccagaacagattgtaatgtgatgtgatattagaatattgatattttcataatggtttcttatacataggtttagtctgattcaatgaggacaaacaaagctgtatataggtataaacaaatgcagctaaacgggggagaaggggaaaaggagaaatgaaggtaaatgctagaataaacgaaagggagccaaacaagaagattgagttatttttgaacttaaataagtacatttcattcaaaagacaaaaaggttctgattaaaatttgtgttttgacagccctgtcctttgctgattctgtttaggcccttaaatggaatgacagggcacacaatccaattggctgctgtgattaaaaggtcagccagtgaattcagcaccaacaaacaaacaaacttcccttcccaattactggcattttattcatgtgagcaggaagcagtggaaaaccagtacccctccctcacaaatccaaggagaggctccatccactttctcctggtgctttaaggaaataaattcaaccacctttaaataatcccagcacatatatagcttttcaggctcaatgactgtgttctttctctacttctgaactattagtctagtaggaaacccttagaaaattaaaaggtttttaagaaaaggaatcactttgtccctaaacaaaagaacaatgcaaaaggtcctcccgcagacagtctgttagatatcagattatttccaccatgctcccctattattcacctgtcagtaaaatatgtcctctcactgtttcggtttgaatgcctatttttatctgactggagctatatggtcatttttgtatttattactaagttctttaggttgtctcctgcttctttgccccccacctcagcgtatgtttttctcttctgaaaaactgggccacatgcctctgaggagaaagtagtgcattatttcattcccaccttttcttctttttggcatctctgaggcctgctatgcccagaagtgcttctactcaagctggaccatcaaatcaattatcacagcagtctgctttccaaatatgaatggcaatgaatgacaacaggcaaggcaaactttcagctttgatttgtcattggtaatgtaaatctgttttgggtcccctacccttctccttttatatctctgtttctccccgtatctgtctttctctttccccctttcttattctcattccagagggtctagtgtttggccaaattcttccccttattttctgcagctgcagaaaatcaaatcttcaaataaaagcttcacctttgtgagtgaaagtcacaggagggaaatagtgctggcaactattatcactctgaaatctctccctgctaacttctgggcctgattactactgcctgggaaggaacacaagagtgttgcattcttattcattggggctgcttaaaattcttgcctgcttctgtatttcaagcttcaattgttttgtgcttaatgttactcatttcatatcaagttcttggttattggaaatactttaatttttaaaatgttattatattctagctgtttaaaaagattgagaatgctataaagcaagagactggtttaagcaaaccagaagtagctttcatgatgctgtgtgtactcattaatccatcaattttgtgaggatgtctgcaatttctagtatgctatagtgttttacatttttttcctcaagctgacagcaatacttctcattggccaatgacaccagactttcaccaattatatttataaatattgctttaaaatgagttcaaagcagtaagatcccttgagagaacagggaaaagaataaattacggcaaacacagttcagtagaaattctgtggtaaagacttaaaatatagattgtcttgattttgtcaagtaatggggagtggctaaagctgtacttataatcagtttaagtggtgaattaagttgtctattctcataattagtccttatattcaaccataagctactttacaatgtgcatacattattctttgtatgtgtaaggtatgggtacaaataatagcagagtatgaattataatccttactacccccaaacaagctaagggaaataatgagtttctacttggcacttgttatattttcaatcctgcttcttgactacaaatctccctcttagtgaagtctgcctcatcatcttcaacaggctccaaaatacagaacaatatccctcatgaacattgatgcaaaaattctgaataaaataccggcaaatccaatccaagaacacatcagagaaatcatccaccatgatcaagtaggcttcatcccaggcatgtaaggatagttcaacatacgaaaatccatcaatgtaatctaccatataaacagactgaagaaaaaaaaaacacatgatcatctcactagatgccaaaaaagcctttgacaaaatcaaacaccccttcatgaaaaagtcttggagaaataatggataacaggaacataataataaaacaacataataaaagcaatatacagcaagctgacagccaacatcaaattaaattgagagaaactcaatgcaattcctctagaatcagggacaagacaaggctgtccactctctccatacctcttcaatattgtccttgaagttctagctagagcaataagacaacaaaaggatatcgagggaatacaaatcagaaaggaagaagtcaaactctcactatttgcagatatgatagtctacataagtgacacaaaaaactctaccagggaattcctacagttgataaacaacttcagcaaagtggtaggatacaagattaactcaaaaaagtctgtagccctactatatactgatgacaaattggtggagaaagaaatcagagaaagatcaccctttacaattgccacaaacaaccttggggtaacactaaccaaaaaagtgaaagacctgtaccataagaattttgactctgtaaagaaagaaattaaagaagacaccagaaaatggaaggataccccatgctcttggataagtaggatcaacatagtaaaaatggcaatcttgccaaaagaaatctacagattcaatgcaatccccatcaaaatcccaacacaattcttcacagaccttgaaagaacaattctcaacttcatgtggagaaacaaaagacccagaacagccaaaacaaccctgtacaataaaggaacttcaggaggcatcaccatccctgacttcaagatctattacagagctatagtcctgaaaacagcttggtattggcacaaaaatagacagctagaccaatggaatcgagttgaaaaccctgatagtaacccacacacctatgaactcctgatttttgacaatccaaatttatacactggaacaaagagaacatcctcaacaaatggtgctggcataactggatgctggcatgtagaagactacagatagacccaagcctatcgccatgcacaaaacttaagtcaaaatggatcaaagacctcaacataaacacagccacactgaagttattagaagagaaagtaagaaatacctttgaatgaattggtacaggggacctcttcctgaacatagcacagacactgagatccacaattaataaatgggacctcctgaaactgagaagcttctgtaaggcaaatggtacatttacacaatggagtacttactactcagcggggaaaaaaaaacaaaacaatggaatcttgaagttcacaggcaaatggatggaactagaagaaaccattctgagcgaggggtaacccaatcacaaaaggacaaacatggtatgtcctcactcatatgtggattttagacatggagtaaaggattatcagcctacaatccccactgccagagaagctagtaatcaaagaggaccctaagagagacatacatggtcctctgaagaaggggaaagtttcaagatcccctgagaaaattgagagcacgggaagaggggggagggtgctaccagaatgagaagggaagaagaggaaggatgcagaggtcatgaagaatagaagaaaggatatgtgataggtagggttttatttgggggagggtggtaggggatgatgagatggagaagggaactgggattgtcatgtaaaacaattttgtttctaattcaaataaaaaagacaaaagaaaatctgagggaataaaagaatccagatatgaaaaccagactatattaaagattagtatttgatgagtattattgtctaaatctgaaatgtccccaaaggctcaggtgttcaaccattttccccaagctgggtacactgttttttgaagctgtagaatgtttaggaaatgggtccacactgacagaagcaggccatcaggggtgggccactggagattatatctgttccctaattcctcattctttgctttggttctttcttggtctgtggttacatgaactgcctcttccattcttttttacctccacaaaatgagtagctacagtggaatgaagactctgaaaccattacccaaaataaatctttcttcctttaaactgctcctgccaagtattatagttaaaccagtgaaagggaaatacactaaatgtcaagagcattccacagaaagcctagagtctgtaactttagcatggggtatctgacacttcatggggtaaaaaagatctaagctaagcatggtagaaatatggattgggttttcacaggtaggaagtcagagagatgttactaccaatggcaagtaaatgtattaaactaatttactcattgtatattttctgaaatacatagttttgagctaaaaggtctttggaattatttttataaatggctaactaaataggaacaaagaagaacttgtataaagtagaaaaggcaataaatggaaaataaggacgtctttattcttatggatatgatattctagatcaaaggctgttctcaatggcacagcaaaaactataacaaatatgactctagttctgcttgaacagtgcttgtttcttgttttaagatgtctacctatgaagctcaggctggtccaggtgttgagattataggcttggattatgaagctcaactttattagggaattcttataaaatagtgcccaatctctcaagagaattgtgagttattccaaaggactctttctacctagattcataaaaaaaaaaccaccctgcacttagagtatatactatatagcaactgcaatctgatgagtctccttccttggccagcacctacaccttctattctactttcctaggtcaatgacaacaatatatagctgagtgacttacagcaggagtgcttttattcacagttcatgaggaaagaattttgaaataatacccagcaggattggttctttctgggggctctaaggagagctcattacattcttgtttctgctggctgccagttacctttgggattacttggttcatgcatgtatcactctagcctttgcttgtacaatcttaccacattactttatgtgtctttgtgtccctgtgtttcacaaaggattcttaagaggatttaaggtctatcttgatccaggatgaacacactttaacttgagtacatcttcaatgaccctattctatacaatcatcttttgcaaataaactcttatttacagaaacaagggatcagtaattcaatatattctggtggatgacatactttaacacacaactatatcacagtctagtgttaactgattatttccctatgtggatttacacaatccatttccaatgattcatttcccacatgtatttctttttaaacaatcaatttcatacaacacatatactaagccaactgactccaaacttccaaactaaaatgtctattatctaatttggttttggacatattggagctgtcttagaaatacattttctacttcacatagtagaaggaaggtagtacactcaaagttacattagaccctacagggagatttaaaaaaaactgattaaaaaaattggtttctactctcagtttacagccctgaggtttcacagaatagaatgttctgcagtggaagggatcataaagatcatctattctaaacaactcattttatagatgaggcctttgaggcccaaagaggttaactaacttgcccacggctcacaaagttaattgcaaggaacatgcaagggaaacaaatgaatggcacaattttaaagaaatccagctagttttttgcttccaaactgaatatacactgaatgttgatgatgtgctatgaagagattagatcaaagtctagcagtcatgagcaattctggactaggcgccaagcctcttcatcttctcctttgctgtgatctctgaagccatacaagggagcaaaatgactccataatcttttttccccacctggggcttggggttagtttcagttatctgggaaagcaataccttaatagtagaaaggtaaagggatgcttttctggctttgctcttctgcctgttgtaattctctgaagcccaaaagggaagggtagagagtccctagagcagcagtcaggcagaaaggacttgagcatttgctaaaagagatgactatgacccaaggttcaatcctgtttcaaaagaaaaatattcataattgctgatagttttaggaatcaagaaagggcatattacttacttcaagtataacaaatccttggaagagcttataagaaagtctgcgggtcagagatgctctttttctgacccttttataaaaaaaaaagaaagatgattggaatgtgaaattgaactggcagtaacagacttatgagtaatatgccattattaaaaaacaatatagtatcatggtgttctaactaaactaaaggtgtaattaaaccaaaccaaaaatattgaggggctggagctcagtaaataaaagcactatctgcttttgcaaaggactctgttcagttcccatcacacatatgacagtttaaaaccaacatcctccccttcaaggacaccaggcctgcatatgttacactatacacacatacatgcaggcaaatggttacatacataacaataaataagtcttttaaacaacaatgaaagaacacctgaaaaaaatataagacatcacaggaaggaactaagaatttatttatctcttttgtttcccacagcactaaattatgtatgaattaatggaactggcttttcagctgtcttgcctaatatatggagaagcttacttcttgctcaaaaaatgggaaaggtttaaaattaaagaggaaatgcactacttttcaagtatactattttgggatacattgaaaaattaactgtgtttctactaatttattcagtatttcattcaaaatattctttacataattacatttctcagcactaactctaagaactgcaattccaaattatgtgatttcaagtgcacctatatgcaaagatgtgaatttagcagattttagcttcatcatcttgaaaatagagctgtggagcaataaagtgatgtgttagagattaacaaataagcttacataataagagattccaacacacagtagaatgtcacattctttgtggttttgacaaacgatttgacattgtaatgaccatctctatgaggggtagaatctaattatgggttttccgactcataagaagtttttgagggattttatttacttgggacagtactgcaaaactcattcatgaaatgatcaccctctcaagaaagttctaactttggaaaactccacgagttaataacttattagaagatagtctcccttgcacatctctttcattgtgcccggagagctgtgattttgtcctttatgatatagccgagaagtggagctttttactgtaaattttcattgcagacttcactaaggcttgtacttggaaaagcagatattattacatagttattaaatttaaaacccacactttacttctttggtcacacatgcagaaatcaatgtaaggatccaataagaaactgctagggaaataattctgcatatatttcaatatttcaatttaataatattgtgtaattatctaattcacctcctgaaaaggatagagctgatttacttgcataatttcccctaattatgtaatttgaaaaggatattttttaaagtagtattgtttagctaataagaaatattaccttttcaatggaaaaaataattctataacttaggatttttgaagcttaggattttttcttatacaagttttgtacaaaagcactattaagcccttacatattggctgaaattcagaatttcattcctcaaacccaggagacatacaattcaatttagatgaggtaaggtgcatacaatggtggcagagaggatttttagtgtgtacctatacctttgctatttgctaacacaagcctaagctgaactttgatagtttgctatgagaatgctggctggagaagttgtttcagtgtgattttagacttttccaccgtttaatactacacaactacttttattgacttcctatgaacatgtaactacagctggtgactaatcaaattccatggcccaacatgaaaaagtattctgttattttaacccaaatacgaacatgactttatcaatgtttatattaatgtgatgtaatttatggctatataccatcagaatgatgagtgaacatggacatttcattttgaagggaagacccagacaatagatttgtcttaaatactagtattaatgtgttggtttccaataacacacagcaaagctccaaaataactaatctttacatatgatgtatatatgagcttttaaaaatatttgcttggtaattttggcaatatgtgtttggtaatttttcatttctctctctttttttaagtaggcatgctgtttccactaggattacagtagtagtactattatgtaattaattttggaaacattacagtatttccctgaaatgacctacagatacaacttgacaactgaatccacttagctagtagcatggtgattaaaatctgcacttgcacttcaagacagcataatgcttatacaggactgacaacaagccattttcttggctaatacctgattgatggtccattcttaacatgcttggagaaagacattaataagatagtctatgcctctttttttaataaaccttgcaatatctacagatgatctctatttcagatgactctaaatagctaaatacgaataaaaagaacacctttctggctcattaaggcaattgctcaagctgtcattagcattacctttctgaaactgtagtacatgatgcagcaggccttgtctactgcacaaactaatggcacagagctaccttttgacagcaggactaaatttacatactttacatattcagtgactaaaaaaatttacattaatcaatatgctacgtttggggggattttaccccatttgaaatgtacctgtacactttgaggcctagttactgacaactatatataaaatgaattaactatgtcaaggcaaaagaggggctttacctcttactttgccctacccacttttgatagagcaattgtaaattatgcttcagaagataaatagcaagtcatgcctgaaaagatgagatgctctggttttcatcttcagacctgcgaggctgactacctgtcagataaggctgaagctaggattatgtcttgaaaaagctgacaaaccacagatttttatcactaaatcaaacctgctgggtttaaactctgtgaactttaattatctcatatttaattaaaagaactagattaagctaaaaatggagggcagggggaggtccatgcaaggatattcaaggagctgttagggctgaagtaatttcattttcacaaatcaaatttcttagttctaataaagcaagtttacatatagaggagattcaaggaatcacttggctggataatagtagaggttatctagtccatccctgaatgataatcgtctactttgttcttttgagtctctgcacaaagaggcttctgcatatggtgaaaaggtttcatactgctaagggctgttctccagagaatgagaaaatggcaatgtttagacttcatcaactaagagatgagtgcatctgtgttccgaaggttgcactactattaggtaaaacagtatgattaccagtattttcacattgcgtcttagaagaataattttactatttaagcaggaagtcctcattgatcatctcttctcacagttgacaaacttttatcttgcaggaaatgttttgggttttaaaggatatagggtctctgtcataactgctcaactctgccataaataatatgtaatggatgaatgtggatatgttgccaaacttttatttactcttatcttggctgttttctaaccatttagattttgcccagatttcagttcatctataggctggtgtgtcgtcttctagtgtattctacatataaatcatatgaagtgaaggtaaaataatataaaacagagacgctattcacaatggttgggagacaagcccccctccaccaaaaattaaagaactgccaaatgatatcaaacagcattacaaaggggctataatgtgtgggatagcccacaggattaaaagaggaaatggctatagtggctactacagagtagttgcagcaggattcatgtgtaactaattatgccaacaggaatcatctgcacgtgtgtaaatggagaagagacagaaagagcactccaaatgggggaaatatgatgacccatttatggagaagtagaagaccctgtctaagcagaatcaattagaggaatgaattcattcactcagtagataagtattgatcacttctctgtgtgttaggcgttatgctaaatgtgaaaccgactgtgatgagttatatacaattcttgtattgtcatggctcagtcttgttagaaggacaaataaacaaacaattacaattcaggacaaaccatgatcaggtgtttgcactgaaatctcaagtcttatggaaaacacctgggataatttttaaaacttatgtcagtcctcaatcttccattcatttacgtttaaggtagaggtctgtgatttaaaatttaaaaggaatgaaactgctatttaaaatttttttgtggtctctcctaggagtgacacaataacctttgctacagaagtgcgtacattatatgactttcctataaggaattttcagagaccctttcaagattataatcataatcctaaatttggcagggattattgtctttttggttggtgtgactgaaattgagcattctatcactggacctaacaatggccacacacctgtctgaaagccttttcagcaatgaggcaaatgactatggaaaagcctagaatgtttttattttcatcaaagatcttttaaaaaggatttatacctacctacatgagatggctcaggatcaatattgcttggagcataacataaattttcaactctttgatttgaaaagtcttaaaagaatttcagtaactatttctaccaattaatcggtcatttaaaaatatagtggtattgctagtcttgtttgtggcaagagctaaaaatctagctagatgtgttcctgaccatatgaccaaggaaacgacgagcaatcccataaatctttctcatgattccccaagtaaaaggcgataatgtaaggaaagagcatgttgtttgaaacctgaaaaactggctttaagattccaattcagttattcactagggacgatattgaacaagctacttgacttctttaagcctccattcctaaactaaagaagataaaaactgatgctctggcacaatgtgcagatggcatgagatggcttacataagatacctgccaaccatacccaagatgctgtagagactgacttctgttgttctttctctagaggaagttctaactcaattgtttttagggcactcagcatgagcagcagacacaaaggtgtcatttgctgtataaaagacataagtaaactcatagcataaaagagggaacaggcttgcatatggataacttttctgctagggttattgtggataggctatgagcagtggtagttactaaccaactcaactagaatctaaatgtgtcactgcattttcacactcattttttaagttatctctgtcatagaccccagaatctaaatgtgtaactatattttcaccctcatttgaaagttatctctgtcagatcccacctgttttggctggttttcccagacagggtttctctgtgtagccctggctgtcctggaactggctccgtagataaggctggctttgaactcaaacatctctctgcatctgtcttataagtgctggggataaaggcctatgccactcctacatccctctttagaaggcagagtgattagtgacaggcaatggtgacaaaaattagaggaaaacaaaattttcctagaaatgcctctattttctacaacagttgagaaatactctattcattttttgcgcccttggcatgttggaataccaatactgcctctgtttaagaatagatcatccatgcttctatactcagcattagaatgagacttctttagtaaagaatatatttggaaggctctctgaactagaacaagtctatccttctgtgaataacagctatcatggcctgggaatatgttctgctcttcagttttcatcttaacctgaatatgtcacacatattggagttgagtacattgcacagatatttttttaaacagtcttaaaccttcattacattgcattatctccaaatagtctatctttgtttgccattaaaagtacactcactactatcactgcccaatgaatgagttctgaagagatgaattatgcatccaaggttgtatttctctacagaaaaatcaataagattcccaaaatatcacaatagttgaataacaatagggaaaaactatcatattgctatgggccacacccgaaggggtgagagtctacaaaagaaagcttaaataatcggaactataaatacatagttcctttcatgcatatgtagcttgattgcataacactcatatatgcaaagaatggaaatatttaagcactgtaccagttatttgcaatcactttaataaaacacctagaacatgcaatgaaactatgctgattgtgatggcacatgcttacaatctttgaacacagaaggctgaactgggaggatcaagggtaatcagaagtatgctgcaagttacaagtcagcctcagtgacatagtgagaccaggtctcaataaacaaagagagacagaatcaagataaaataacaaagtgtgttataatattagtttatgattgagctgatataatataaataaaatttaagtgaagcaaagcacagataatacatgttttttctcactgaaaatcatgcagtctggctgaatacattacatagtcaaggaatgaactggttatcaccaactccagcagcattcaaatttatttctttggaaagtaataagttaatgaaaaggtgctactttctatgatatggatgtccttcactattagaatcttttgaattccacaatgaatacatattcatgaatgtgcactcttctcaaaacaggggtttagacagtctactccattaaacataagtttatttttctcccaggtatcagccagggaatcaacattctggtcagtggccttttcatgatgtttgtcctaatagatgccacctggaaataaaaccaactgatgtttaatggaatagcttttaaaatctctactcagggagggtgttgtttcatgaagaactaattaattcaaaatgttagaaatgaatataaattccttaataaaactgtaaagctgaaagcaatgaaatcaggagttaaacaaaactatataatttattttatattatatactgatattcttttgatttttctaataattggtacctgtacccttgggtctttttctggttggactattttcattgccctctcaagtttctggcatatttgatgatgacaaatacttgcttaagtatttgtcacattgcttaagttgcaaaagttatgaaaaacagatatatgtgtcctggttcagtgatctattacatggctatactctcagcacacaagcaatcatatagctagctaatgagtagtaatattttagtgttacataaaacctaaaagaggtatgtacctcggaatcctggttcccttgagaaggaaataataataataataataataataataataataataataataaactgtttgtggggctggagagaagtctcagttattaggcacactggctgctcttccagaagacctggggttggttcccagcacccacacggtggctcacaaccatctgtgaatccaattcccaggaattctatgcccattgtggcctgcacaagcactgcatgcacatgaccatagacatatatgcaaacaaaacacccatatgtataaaataaaatacatctttaaaaatccctaattcagagcattctatgttaaaacccaatggcaaagtatcaaactaaaataacactcttgttaaatataaactacacatgacaatatgaaagaaatataatgaataatttttccaaattttgttagattaagagggaggacaatggggatcgtgaactccatatacatgacttctgttgtgttcagctgaaagcaaacaatatttgaataacttcagtttctgtcactatgggaagatactagagctaatgcacatgacacaaatccctacttccttacagacttgggtatttgtgttccttgaaaaacattctatcctgttcaccctaggtgcccacaatgattattaggagtagcggtcatgtttataagtgacaatggccaaaggcctatgttcagaatattataatagcctattgttctactctcgagcaaaaactatctctggtatagaatgtatgatggcagtaaggacacaatgtacacgaatcctaagtggaaaaactttccttcgtttttctaaaatgtattttcctgacagcttggtatgattgacagttcttacacactgacctaatgaaccttcagcctggaaaccttcatacattgcctgataagcagtgaactaagttttactataggcatcattcctaagctccagtgatctgactaaagtgacatggcctccaaattccactgtgaacatttattgcaggccagttaaagtaggaaagttatcaaactgactttgtccctgattttataatctttctatgaactagcacaaatcacctgttttgggtttgatgaaacatttcattgcatattgtccatggaaaatgcacagaatgtcagaatgtgctagaattttgtctctgctaatattttgcaaagggataaactatggtataggaaaataccatatagatacaagtccatatgccaattatttgcttattctcttgcaaacaatgaaatacattctaatatatatatatgcaatgaataaataaatgtaatcatttaaaattaaaatatattgttcatctagtgattttaggtgttgtttcttccttagccattagagtcaccttatatgaagtaaaaagtagacaggacacaacaccagtatggcaatgactcagaattgcccctaacaccaaaaatatgctctttaaaaagcagtctgtcagaaagagagtaaaactcatttatttgaaatatttgtataacaccaacaaaaaggaattagtatataactgataagtgacttcctctggaatttaatgaatgggactttagtatacatatgctgtggttaacattttaaacttctcaaaatccttcatgatggaatgttgacatctcatattcccaaattaaaacattcattcattgctctaagtcaaagatgaaggaaagggtgtgttcatcagatgtactgtgtacacagatctttaagtttagcttcatgttgtctttcagtcctctaagaaactatgactgatttgctgaagaggactggcttccacattttccccctggaagtatactttaagatctactatatatagtgtataagtatcctgtacatgcgaccaaggtacttatctgtaagggacatagttggggtgctaattacaattttgagaattactatactggtattgagcattaacatcagttcatttgtctgctattcccatacttacctaattcctccctttcttttccttccttccctctctgtctttctgtctctctgtctctgtctctctctctttcaactacatctcctctttcaagcagtccttgaagtagcagttttatgtatcctgtcacattatctctgtcctggtcaattggacacaggttagacagccaactcaagaggaacaaatccacaggccacatcagagcagtcaggtgctgtcatgaaaatctgaactaggtcagactaatatcatataaagcaagagccatgctgcattgcagctgtgacagtcatgtagttatgatcacataggaaatgaactgccaaaaaaaggagtagatagaagtgataatgaaaccaaggtgagtaaaatctctactaaaacactagctgtggaggaacacagcactaccttgaatggagagcaaggaacccatttccagaaatctagatcaagatgtgataaaggtcttgccttaaattcccttaagcctctctgtagctcttcaacaaacactccatttaaatagctttttgtcccttgcaatcagaagaggcttaattaagtaaaatatttattaatatttctttaactactcatataaaaatgaaaagtaattacatatccagggcctagaagataagggatactctaagatgcttcctttctctaacatacttctcaaatattctcaatacctttccaatgctgtcaatgcaatatgctccacttttcctttctgggtcaaaatgctttatcactatcttatcaccaggaactaaatggcataggtcttttgttttgttttttgtttttttgttttgttttgttttgttttgtttttcaagacagggtttctctgtgtagctttggagcctatcctggcattctctctggagaccaggctggcctcgaactcacaggcctgcctccgccttcccagtgctgggattaaaagtgtgcgccaccaacgcccagcggcatgggtcttaagaatgaataattaatcattctatatccatatagtatctatggattcattttgtttaacatggtagataatagtttaagcctatattcttccaattaaactgtgaacatgttccttactgaggtcctttacccttcccaggctgacaaaacttgagagcatattgtataattaccaccttgaaaatactcctgaaagcagtgaaacagcaacctgagcacaaaccggaagaaagctgtaaacagcttcagatgatttataggaaaggaattctacaaagcttccttaatggtaggaaataaacagtttttactgctatttagttaaatgataattacgaaactcattgaactgaatgagaattaggattgtcagacaaatgcttgtaaggggttaattaattcatacgaaccacacagctcagctgaaaatgggctcattattctaagccactaacattgtctgctccttagtactgccttcctttcgccatttcattcacactactgcatccccaccccaggagtaaatgtcagaagacagaatatttaaaaggaaatgtgagctaaaagcattttgcaagggtacatcaggggtacaaagatgtctgctggaacactgaaatggaaagatcatttattagtacaccatggttcagaacatcccaaagggttcaatattttcattacgcacacaaatataccccctcctccttttcaaatgcctcattacagctaagcctggagcttttttcttaaaaagctttcctctgaaattattaataatatgaagttccctacaggctaagggtattattacagtcaaaatacatcaatatgtatatatacgtatatacttatatacgttctttcatactattttaaataacaaagtatttagtgggaacagtaaagaatttataagctctacacagagaagcctagaggaagatggcaatatcccagactctcagaaacagctcttgaagcttattaggtgggtgtaggagactgtaataggattatgagttttggtttagcctgtccatcatttcaaaatccccataactaaaggaaatatcttcataggggtctgagtttagtattgaagctgctttatttaattcttcctattttataatgctgagtgctaattagttccatccactttctttaggcttgtcaataaggcaacttggaagccaagaacctgctgaattatggattaaccagttctgtaacagcatattcaagcaacctagttagctgctccaaagcagaatggtattataggcacaggaaagcataaaatattcttcttcttaaagacaggacaattactccttgcaagtaacctgtttatttttgatatgttaacgaacactttagatacataaaagctaagataatatttacttttaagtgtctgaagagccaattacattcagaatatctataatatctgctgctaaaaaccacaaacaagnnnnnnnnnnnnnnnnnnncttcttttttaaatgtaaaggcaggaaagattaagacactgacactgagtggcatgactgtaaagtctagcttcactcttaatgaaccttcattctggtctctgagcttcctaccattttccaaccttagtgtttcagtggactccttcctcttcctcatccagatatactttggaaccagctctctgggctcataagttctggtatctggagtattaaagatagattgaagtggtgttctcactctggaatgaatttactgacatccacaggttaaacaactagtgtgcagatagaaaagcgagcctgggaagatgaacccaagcttttgacttctctgtctaaaactccttcacttctgtttatcataataggtcccttccactatggccagacttgcctccggatagggaccctttcaaagttctgggataccctctcatagacactagtcttcttagccatgaagaattaagctgtcatccagacctcacaaaatttgatccgtgtaactattacatatatctagattactgccagagtgtgcccacgcttcccatgtttccacagactatcttccttccttatttttttttttaccttgtcacatttttactagttcattgataatttcaaatgatgcagtttggtcgcacttaccccatcttgcatatacatcctcttccctacatacccaactttctgcgtcccccatttaagcccatcaagcacaggttgtgctgcccatatattgttggatttgtgctttttccagtggagcttggttagcctaccaggggacacactcttaaagaaaactgactatgttccattgactaacaaggattggctatctggatttcaactgttttaagagtgagtctggatcacaagtttcactatttgccttcacttacagagcaatatcatatgttgctctgtgttaaagacatcactccattccctctcctaaaggtcaacatttttctaatcatgttctttctttattagcacctccaagctgttcctctgttcttgactttaaaacactagagtttaagaatgcttgcttatagaggacctgagttggtttccttcacaactgcctataactcaaaccccagtaggatacaacactctcttctggcctacactgacactaggtgcatatagacagaagtttctatactgcctggtcccacagccctttagtctcaaacaaacagaggtttatattaataataaactgtttggcctgttgctctggcttattactgtctacctcttacagcttgaaataaccaataattcttatctatgtgtagccacatagcttggcaccttctctcagtaaggcattctcatcttgtgttctctgtgactgaccagcaactctatctctgcctttcctcttcccagaattctcctagtctggtaaccctgacaatactttctcctggttcctaggtatttacatgtatgtacacttctcatagtaattcataagggcaaagtatggggattttttattagaaagaaaattatttcacatgtcaatcccaggtccctcccccccctcctcccctgccccccccaactaatgccctacccatcccataccctttctgctccccaggtaaggtgagaccttccataggggggggtcttcacagtctgtcatattctttgggatagggcccaagataatccccttgtgtctagcctcagagagtatccttccatgtgggatgggctccgaaagtccattcctatggtagcaataagtagtgatccattacaagaggccccatagatttccaaggtctcttcactgacacccacattcagggggtctggatcagtcccatgctggtttcccatcaatcagtctggggaccaagagttttctttgttcaggtcagctgtttctgtgggtttcaccaaccttgtatggacgcctttgctcatcagtcctccttctctgtatctggatttcagttcagttcaagctttagctgtgggtgtctgcttctactttctgtagtagttcagtacttatccctagcataggtgtggactttgggagcccaatccacatacagagatactcattgatccaagacacacagggatgggcctaggccctatcccaaaggatatgatagactctgatgaccccctatggaaggcctaaacctccctggggagcagaaaggatatgtgataggtagggtattagttgggggtgagtggtaggggtggaggggagtgggaactgggattgaaagtaaaacaattttgtttcaaattcaaataaaagatttaaaaaattgaaaacagattaaaggagagaaaaaggcacaaactggtcattgattgcattcgatgaagcaattttaaccaggttacacacttaagaacagtatagttccaatagtcacctgaaattcaaaattgaaaggtagcacatgcaaacccatgcaatgtgcacttgatcctttaaaatacccacaaagctagattttactcctttggattatccatgtctttttgcttcagcaacatacagcttgaagatatttttcttagatttttatttcctttttctaatgtttgacctttaagtagaaagaaaaataatgaaatttaaaatgaaacagtaaaggaaaaattaatatgagtctgaaggaggtaggaaaaatgtgattgggaaggcaaagtttgtttcaagaggagactctgagcaaaagtgaagcaagataaatgagctctgcattactgaaatttccactgatgagagtaaaggtaatatttttgtttgtctgttcgatttttacttttgtcaagactttcattatgtagctccggctctcctggaactctctacgtaggccaggctggccttgaactctcagagatttgcctgcctctgtttcctaattgctgggattaaagcattggccactaagctcagttagggaatctttagtaactacctaggcatgctattaagtaaaaaagaattgaggcgtgtaatcggggattaagatgcaatttttccataagcaattgttggaaaataaattcaatatttgagagttttgtacaaagccaatgtataatttttcctatttctttgcttttgtggttgttactgttatgtttaagaggaatgaatagcaactacattttctctgcaacattactgagggtgaaacataactatcaacactatattcttgatattatatattatttctcacaaaatatgttaaatactttgaatattcattttttcttattcactttttaatacattacaatagtttttgaacagataaatacttttcttacagtgtgaaaattagataaaagacagaaccaacaaatgaaggcaacatcaaacaggtaaaatctcacatttgaggagaaaaagaatacatttcagttagcagaaacctgggctatttacaaaaggataaagatagtagttgaatatatgtttctgtgaccaccagagaataaagctgaggaggggaattgtatgagagaataatgccttggcaaataactatggacatttaggaaaggaaacttagatataatatcattgcataatttaataggacaaatagctagaggataatttcattttaaaatagaaaaatctaaaataagatcattgctacccagaaaccacaggtaacgagtttatctgcataactctgggcttacccatttcaaataggaagactttttcttagacattttgaaaagttattattcaaagctctattccatactttgtggtggtcaataaagataatctactctaagtacacttttgctgagtcatggaatcattgtggacatcatactgtactctcagttcctgatccatggaagagacagaggaaaacctgctttatgcttaaagttttcttcatttaaaaaaactagtcttaattgttatattaacttttttgtattgccacaatcagcacctaagtgaagaacattagaaacaatttttggcagtgcttaaattcagatacttgagcattcttagtaatctgttattgccaggatacatcttcagccgttgtttttattttgatttattttttaaattagcaaacaaacagatttcattatggcattttcatacacacttaaatcctgttgatcctcttcccatctcttcttttaactaccttcctgattccacaatttttcaccccagcactccttacttatactacaccattatctttcctactttccttccttaaaagttcccccttttcatggccttttttctcatttcctagcctctactcatgctcctacacaaatatacatacattaaaattagaatctggaaactacttatgaaagaagctatttagtaaaatattttgtaatcccatcccctgaaattttcataatttcactttgtcataaaaatactccatatgtatgtgaaccatattttaattattccttcatcagctaaggatatctaggctgattctacttccttgctattgtgtggaaagacacagtgaacttggatgtacaaataggatatatagttctaagcttttgagaaacctccaggctgagtttcatagtcctattttcttcttaagataagagtgctgttatatagtttaggttccagtaactcactttgtagccctaagctggcctgaaggccattactctcttgcctcaccttccctctgttatatgttttgataattatttcatgttgtccactctaatcatagcagtattaactaatgcttcttagttcttccaatagatgtgaaaaatctccttctacctcccaatgctagtatacttcttcccatttccaaggtgacaagaaaactcaaatttgaaacagctgcgtgtaacaaaaaaacaaaacaaaacaaaaaaaaaaaaaacaaaaaaacagagaattggggggaggtgcaaggctgtcttccaatgaaatgccacacattgttaagagaattcctcacatttcttttacttcctatgaaatattgtacttttcttactttcaggtatattgtttaattttgacaagacagacagaatttctgtatatgtatagttgctggaatagggagatttcaaaccacttaagtggtattgtgttaaaatgtactgtaaatctggcttggtattgacacaaaaatagacaagtagaccaatggaatcaaattaaaaaccctggtattaacccacacacctatgaacacctgatttttggcaaagaagctaaagatatacaatggaaaaaagaaagcatattcaacaaatggtgctggcataactggatgctggcatgtagaagactgcagatagatccatatctgtcaccaagcacaaaacttaagtccaaatagatcaaagacctcaatataaatccagctacactgaacctcttagaagagaaagtaggtggtaccctcaaaggaattgataaaggagaagtttcctgaacataacagcagtagtacagacactgagatagatgattaattaatgggacctcctgaaactgagaagcttctataaggcaaaggacacagtcaacaagacaaaacgacagcctacagaatgggaaaagatattcaccaaccccacatccaacagagggctgatatacaaaatatacaaagaactcagaagttacttaccaaaacaccaaataatccaattaaaaagtggggtacagaactaaatagagaattctcaatggaggaatctaaaatggctgaaagacacataagaaagtgctcaacatctttagccatccgggaaatggaaatcaaaacaacattgagataccatcttactcctgttagaatagctaaaatcaaaaacaccaatgacagcttatgctggagaggttgtggagaaagggaaacactcctccactgctggtggcagtgctaactcaaacagccactttggaaatcagtatggcaactcctcaggaaaatgggaatcaatctaccacaagatccatcctgagtacagtacccctgtcacaaaaagacaaacatggtatgtattcactcagacgtggattttagacagagcaaaggattaccagcctataatccacactgccagagaagctaggaaacaaggaggaccttaagagagacatacatggtcccctgaagaaggggaaagggaccagacctcctgagctaattggaagcatggggggaagggagagggaactataagaaaaagaagggttcgagaagaggagggggaggaggacatgagggagcaagaagattgaatcaggggaagaatagaggagaacaagaaaagatataccataatagagggagccatcttagttttaaagagaattctggcagtagggaaatgtccagagatatacgagtttgaccccaactaaccatctaagcactagtggagaggctaccttaaatgcccttctccaataatgagattgataacttcctcatatgccatcctagagctttcatccagtagctgatggaatcagaagcagacacccacagctaaacactgagctgaactctggaatcctattgcagagagggaggagtgatgagcaaaggtgtcaagaccaggctgttgaaacccacagaaacacctgacttgaacaagtggctgctcatggactccagactgatagctgggaaaccagcataggactgctccaaaccccctgaaggaggatgttagtttggaggactggttaatctatggggcctctggtggatcagtatttatctctagtatacaaatggacttagggcgcccactctacagagagggatactctctcaggccagacacacaggggaggttctaggccctgctccaaatgatatgacagactttgaagatctgctatgaaaggactcaccctccctcgggagcacaaagggtttggaatagtggtaaggggcggaggaggaggggagggagagggaactgggattgacatataaaacaagattgtttctaattcaaaattggtctaattacaattataaaaataaaaaatgtactgtaaatatgatatatgcatcttacctgacatatttctaatatatatgtacataaacacaaaatattagtatatactatattatgctatgtaaaatcttaggaaataagttacataaataagaaatctacaatttgatatgaatcaacctaattggtaatttattgttgttccttgtttaaaaccaaaccccacattcctttgtggcaaggtcaattttgatatacatatatgtttacatttatgtacatatgtacatatatattacatatgtgtattatagatatacatgtatacataaacatacacaggtgtgtgagacttccatagttagtatttagttatctttttttaaaatatagagtgctgttagatagcttagattcccataattcactgcataatccagtgtgtgtgtgtgcgtgtgtgtgtgtgtgtgtgtgtgtgtgtgtgtataaaatcagtaattacagaatttatgctctgagatagctcaggcaaatcatgctttgtacctggttaacagttaagtaaattcttaattcacttcatttatttttctgaaatcatttgaagatagagctgtcctgatttataagaatatgcgttatacatagaaaaatgttcatgacagcattatttacagtaggaaaaactgggaaaacattcaatgtcaaatttaaggggtagaaggtgtgaattatcatacatttatttatccattataaaaaatattcaactattaaaaagcagacagaaaatgagatccactaatgtgtgaaaatgtttacaaagttaagtgaaaagtagggtacataatcatgtttacagtatagcctgaacagtataaaatatgcatagcaatatatgaaagacaaaaataaaccaaaatgttaatcatagttgcttttgaatattgagaatagagacatttgtctttgtatatttcatgtgtttctaaatttcctgtaatgagaatgcatcatttttataatgcaagctattttagaatagaacactatgttagaaaaatacttctagttatttgagaaggagggcaggcaggaagatcatgtaattagtaaaatggagtgtctatttacttagagaatgcaatcactcactcaagcagtctattgaaggtacagtatatgccaggtacagaaggacttttcggcattttttttaaatatgggtgactcagaaaacctccaaagcccatttcctttgtgctttgttttaattcttagaaaatggaactaaactgaatcattttaatccagctattctgagatgggtcactgactaaattgtaatttttaaagtgttctcgttcatgtagcatcattcctcttcacagaaatattggcaaccatcaaaatcaaatagaaagagaacaagaactctagaacttaacaataagaatccattcagtgccattttcaggatggcctaacacaggacaacgtcagtaaaaacctcaagacttcttttttcatgctgaatttgtcatttcgatacaatccccagaaacctaatagcttctgttcataggtttcatgaaagcaaatggaaagcttaaatattaatattatgtttctgctctcaacagagcttgatggctatgagctctctaatcaaaaggcttaaaatgcatttatctctaatgatggacacttaaaatagagttgcatgaacatctttacggaggaactattaggagaatgaacattttgtgcttcttagatgcatcatcaattatatcaagttctggactgaagaaagaaagattgtttttgctatccacttctagctaaaactcaggaagctacattctattaaaccaaattgtggtgctatatttaaaagtttcccccagactgaagattaataagacaaaaagtatcttactcctggacttatttttacttcatctaaaataaattttttgtacaactttcagtgtaatagtatagcttatccaggcaaataaaccattttttaacaacactcatacacataaaaattatggtagaacatgaagccaggtataggcaatgtttctataggtttgtatacttgtaattattataattatttaaaactttggctataagcagaaggcttcagatgtgggaagtgcttctgtgtatgtgtttatcttattggatgataaataaagtactgtttggccaataaggcagcaagttaggtgggagtaggagtcaaggaggattctgggaaatgtagtaaagaagtggtgatccaggcaggaagtgacacagcaggaggactcatatataaacaagggcaagaagaaagtgggccccttctctcttcctccagagtcaccatgtgagcccagggatacaggacacttattgctggtgtccaataagataagtcttataaaatatacagctttataataattaagactgagctagcagatgagaaatcctagttattggccaagcagcatttgtacctaatacaagtctctgtgtgttacttggggccttaacatggtggcaggtagacttgggcggcttggcagaaagcgcccacatggctgcagggctcagggggcttggagtaaagacttattgtaacaggcttccttaaaacaagatttgctctatctagaaaatatcagacttattctgtgttgaatgagtgtgataagctatgcaattagaatttcaatatactgcatttctgacttaccttttactgatgatcatcaccacaatcaagtgtagatacaagttaacctgattttcttacattcataataatttcaaagcaaacgtaacaaaacttatacagcatcaaattttcttaactatcactgtgataaaataccatggccaaggcaactgaaaagaaagtgattaatttggcttaggtccatgatgatgaagcaaagcaacagatgagagctcacatcttgatccccaactacaactggaactttcagatatctttcgaaacctcaaacctacctctagtgatgtaagccttaatctttcttaaacagttccaccaactaggagccaagaattgaaatatatgtgagcctatagggtcattctcattagagccatcacatcatagaaattctagctgaattttacctcataacccattgttgaacactagataagctctaggcttctcaccacctgtcaaactattttcttttataatataatacctcccttgctgccaagtgtctcatttccttacaactttgaactgacaagagacaagtgatatctttacttgtaggaccacaagcaaggtatgatgattagtttttattgtcaatttgatacaacctagagtcatggaggaagagggaactgcaactgaagaactgtctagattagcctggactgtgggcatgtccgtggagcatttcctcaactgctgagagatgtaggagggcacagcctactctggagcacaccatcgctaggcagacaggcataggcagtatatgaaaggtagttgagcaagccagtaagttgtgttcctacatgggttctgctttacttcctgactccaggctcctgtcttaagctcctgctatgaattctctccgtgacagagtgtagcctgtaagtgaaataaatccattcttccctgagttgcttttactcattgcgcatatcacagcaacagaaaaccaagccagaagatggcattttcatttatgttatgcattcatttgacaaagtatggaaagttcctagtagtgtgaggatttacaaacattccaaagtcaattctcagtctctctctctctctctctctctctctctctctctctctctagttatgtggactaactaatggtagatctctagtggttttcactttatcttttctttttaagtttactgataatattccggcattattttgacccaccctctgtcaactgacaggatatatacccagcattcagtcagatatttggccagctcaagggccctgcaaccaaagtagatacatcatgcattgggcagctatatcatgctttgcatggctgcataaggactctgtacacatgtgcaagctttctcttttaagcaagcactagctgcctgatcctcccttcactttctctccagattggctgacaccaacttcccctatcccctttccccccttcctaataaactcacacacctgggttttgttgggttctgtgattcattactcaccactgttgctgcagcaaaacaacaattatatacttccctttcttttaaagaatgtagaccatgctgggcgttggtggcgcacgccttcaatctcaacactcaagaggcagaggcaggcgcatctctgtgagttcaaggccagcttggtctccagagccagtgccaggagaggctccaaagctacacagagaaaccctgtcttgaaaaaccaaaaaaaaaaaaatgtagaccatggtgtaagaggcttattctcagacttacaactgctactcaaaatggtcagtgcattgaaagatgctactcaaattactgttctaaactacaacagaaaagctcaccatgtaagtatgttaacaaaagataaagactttaattatagccctttagtaaaattgtaggacatagcagctcccaggttttcttggaaaatggcaagagaaagaaaagagacagtgatgagatcagtgccagcattgcagggagggagagtctgcaaacttacaaagtctcagaacctaaaagagcagaaggggtggattagataaattctaggatggcacctggtactctgaccagagaccaagggtgtttcatatatagacactgcttttatcaagtctgcttttcatggaatcttttacaatgaaaatcctcaccccacatactagaaactcacaaagcataaagccatattaccaagcatgttgtaggttaaagattgcctacacactaacttaaggcatccatagactaccccttaggtttgaatcactgtaaaaactcagctttataacaagattttatagtacagtcttagacttttttacttcaatatctatgtgtaaattccattaacattaatgtgcagatttatatattctcaataaagggtgtgtatttccaggtttcattgaaataagaatatccaatagccactatttttttactaggcaaggtagactttgaagaataacataaaattattttgattttaaaagtataatgtttatttactatccttcgttgagaaaacacagcgcttaagaaacttcacacaatacatagtaattacttgatgctcttaacaacaagtgcagatgcttcttaggcttaactatgctataaaatacagaggacagtgcatgacaaatagcatagccaattgaaattgaagaaataatcttccaacatagaatgtaagccatataacagcattccaatgttgagtattttcaggagcaatggcgagaggtgctaagctataaaacagtggaaccctggaaaggggcctatgggctgacacattcagatactgtctgtccctcccccagcctttgttttgttctcaacacatctcaagcctcgcttgccttttgagtggggatttagtcagatctaggattataagagggattgttttgctaaaagcttcataagcaattgaaaaacaccaccttccctcctcccctgccccccaagatacatagttttgaatgaccccaggttgcctcagaaaagaaaatgtgtgattatctgataactgaaaatattattgaattttattactttaattataaaagtcataaaacgaactgcatatgcaataaaaacagattacacaacacatacctgttttcagattgactcaggactatttatggagtggcttggccttagcaatgactaaaatcagatttgaatgctattataaataggcacagactgttcttatgtaacttgtatttatatttatcaataaaagccgtgacttaaagcttgcagtaataaatttgtggggaaagcatggaaaatttattatctctgatcccttctttatctcttcctattatatctgggacaactgtagtacttaggtgatgtgactgaatcttcgtggagagcttttctattttaagcacaaatcatgcattagaaaactccaaagtaaaaaaaattaacatagcaaatgtcaggaaattaagcaaattaaatgatactgtcaatagcaggcaacactgtcaaaggactaataagtgcagttaaataggatcaggaatgggtaatagagctttgaaagtagataagaaggcaatagagacatttaatatcaaggcataaaaaatatgtcgagcacagtaggtattatattaagccatcagacttttgattattattttacctcttgggtagctgacacaagtaaaaatctgtgaggtgttccaagtattaatttgcatcggtgttaaatatcatttataactggtgctagtgtaaggaagattcgtgtcccaattaatgcatttatataatttcaaaacaagcttatttccaaaaatgcaaactacaaaaactgttcatgacatataatcttttaaagcaggcttgctatgcttaattttaaactattatttctcttttcataaatgttcatttgccaggtatcaagtgataagtttgtgaattctgttgtaattaagctacaaagtcataaaagtcataaatgggggtagggggtgagttaacttcatgttattttagaaaagtaacatttatatgataaaaatattatttcctttgttcttctcatgaaatcttgatgttattaaagtggctagaagagaacactttggagtacatattgaattcctcactttcataatgaagatgtggtcctttgtaatctaaaaataattcaaagctatcgaaatagaagtaatattctactatgtctgttttgttctctcttattcacatttaacaagttgtagtatctttcataacaaaactcacaaaagatttacaattagatgtccaaggtaaattagtcaagtttgccttatgtcatttaaacgggacatatttttcatagtaactactttgaaaattactgtctcctcaaaaagacttacacctctgtcaagagaacttctgaagcagtggccgtttcataaactgcatgttattcaagttaagatgacgaaaatgacaggtatagtgggagaagaaagaaggagcatggtagaagaaagaagcctactcactgcctctgtactctctgtcccaaatatagaagtctaataagaacagataatctcctgcaatatgtaactttcagtcatttcctgggaacccaggagtggacctggctggtctgtaatcttagccagtatggaattaatgcctgcttcaaatttgggtcaaaattgtggaactgatttttctcttgaaaatttcaggattaacactgtaaggggtaaagttaacctatgagctctacttgcccaaggacatataacttactggaatgctaggggctgttcatgtaagataatgattaatgtgcttttaaacagggttggttgcccaactgcacaggatgtgcttgattacatgcaggtgggaggtacaataggcaggaagtatgtcaggatgtatgcttgaccccagtgggatgaaggcagaaagtacaatagcctgtgggtcctgcctttaggagcacccgactaacatgactcagcagcatcctctaggaatcctggatatgaactttcttggcagtgttaaataaagccgactttaattagacaatcatggatttggtctttctcttcaatttctcagatttaatgttacacatcatattgaatggtgacactactatgataacattcaccgagctcctgatttgtgttgtttttctaatatgaagactgattagcaattatttatttatccactctcaccatgactctcttatgccactaggatgaactaagctgacaaagaaggaggatggtcatctacacttcattgaggcttctgcatcacttagaaagtcaagatctgagacctcacccagggataaaagtactggatctactttaaagctcaaacttgcatggccaaaagaaacaagaaagcatgatggcatggaaaactacagcagctgcaatatttttgaagtaggacactcagaaaagggcacaggctattgatgtttctggaaacatcatatttaattcctctgtgaaagatttagcggtttagtgaaaagatgcagctaaaggaaaaaaaaacacacactctgaaagaagagttgtgaaagaaaatttgcttaaactaatattagaaagaaaataattcagaaatagttgcctctaataatctacaatcccaaggctagaagaaaaggtcatagctaattggtacaaaagcagctctggatacttaggaagtggtacccggtgatgagtttcaccaaaatacttccctttacctgtaattatgccaggacacatattacaaattatagggcccagaaaagaaggcagaaaatgccacacttcaaaactgaatttcttttctgtttaatgctttttaaagtcacaattaacttttgtaatctgataaagtaggaggtcaaatgctatcaatggtagagaacagaagtgaagcaataaacttacatcatgcattataaaaatatttcttacataatttcatttaatacaatcataatcaaagacagtacttttccagcaccatgctagtttaagtaaataggtaatacacactgcagaatctcactataaccaaaattagcctttacattaaaaaggggaggaggaggagaagaacaagaaacaaaaagctatatattttctaaatatcagaaaaatctgaacatattaattatcttataaggggcctaatttttacaaattttgttttatatacctagtaataaagacttctctttagaatagaacataattatgacctgtcccagtaggcgtttattttatttggatgacttgtgagagacaaaagtaaaataataaatctacccacttgctcactgaaatctagaacttctttcttttcacagaacacaggagtatctgccaacctataaatgaatgtatgctctgaacagacactttcttttatgagggtcgtgtgcatgtgtgtatgtgtgtgtgtgtgtgtgtgatgtttagagggtaaaatatctagccattatataattgtccataataatcatggatataatagtacaaaattatgattactaacaagataccctacttctactagcatttctagtagtaataaggtcaaaatacaaagccaagaattttgttcaggaattcattttattcatttcaaacaccgttgccttcttcctgccacccaaatcaggactattttgcaggaagtaagagataatttatttgaaacaatatgtattgtcattctcacctctctcctcaaggacataatggcaagacttgagacaaataaaactggctccaagcagcaaacaatgctagcataactaaattcccctgtttttcctatttttttaaacccaaggtcattgtatggaatatcgggttaaaaaaatggagaggaggaatggttttgtgaaagacagagcatgaaagtagcagaaatgttctatggaagcatctgagaagaaggctagtgctgtgcaagagcctcaagagtgcaaagcagaggaagcataaagaatagaatatgtaagcatgacaataatgcataatacagagtgctgggcagacagcattcgacttgactgtaatgctttctctgtgccttgcatctttactaggaagtttccattctaaataagacatgcaaattgatcaatactatttgtggcaactgaaaaaaatgttcaaattgcaagatgggatcattagccttttcatgtgtccttcttagtccatatcacacttgaattcaatattttattatttctattagtttcctaaaatctcactgtgttgaaattgtatttctaaagttattttctcttttggcccattattcactaatctgttatgttccatcactaagtatgagcatctcctgtgtcttccatgtgaggctcttaagaccattaattgagtcttttaatgtttgctattggcaaatgagagttaatttaaggggctggggtgggctcaacagttaagagcactggctattcttctagaggaccaagattcaattccgaacacccacatggcagctcaccattgtttgtaactccagttccaggggagtctacactctcacacagacatacaggcaaaacaccattacacataaaaaataaaatgaaaaaaagttaatttaaatttgcacaaaaataagaatctacacatacacagtaggaattttaagtcttttttttcttctcatctattgatatgctgaccaagttatatatgaaatatcatgtatgagacaccttcattttcatgatactatcacttaagatatcactgatatacataattgacatgctttctgaagcatatgtaaaatcaatattgtattatccatatagaattatactgctgaactacaggcaagttccacgtatttggagacaatctatcaatcactttatgagaaacaaaagtattgtttataatttttcaatgcataagaaatacatgcaaggtagtattaactttcctaacaactatatgaaatccttatactttgtttggttttttcctttctttgtgtccagaatgtaccttgccttcctgaaagcactgcagagttgtaaataatgtatgaaaaaagttccttgttcactgcccagagagtactatgctgcttgcctatagtgtaccacatctatgctagacaaacaacaaaacaggccactaaatctgaaatctcaagttaagatcttcccaagtgaaaagggaaaataccatcttagatttcagaaggccttcaaacaaacagttgaaatccttggcatgctcccacccagcagattaaaagcactgaaacttcagaaagggctgttcttctgagtaatttagtgagagcgtagaaagcagaattaatcacttaatgtcatctcaacaggctccctatttctgaagcttccttcttgctcttagagggcagattgacaaaaacagatgggggaagatggtaaagctgaaacaaaaggctctaactgtcattccagttttcattttgtcttctgatggtatttaggaattttgcggaacaaaatgtgatttgaggataacaaacaggtggaagtcaagttcaagcacaacagatataagagtaatggtgtatagttagattcagctttttaaaaagatagaaagaacatcactgtttttcttcacttgtcaagattaaacattactgaaaagaaaggtcatatgacggtaccatacagaggagacattcaagttcccctataaaataaattctgctttcatagaattccattcataatgatgtagacttatatttctatttccttcgtgcctaaattccaaacttcagaaagagctttaggtacagtgaagagactttctggtgggttcaaaatttcttattactgtgaaggattcaacaagcagttatcaagagcatatatcacaatgagtttgccagtacaggctaaaagtatatttccatcgtttaaagcaaaatatgactatactccttgcagcaatttttaccacatagcatcatctctatctaaaagaaagttcacaccagccataaccttaaaagctttcctcagatatgcatggaaacacaggacggtattcctagcattacagaatttaaagcagaatgtttaggacttgttatacaggaagaccttgtgccaaacgaaacaaaacagaagagaacaagccaaaccaaaccaaaccagacagagatgagcccataatcagggcgactgattttagaataattttttaaatatttggttttctagaggttttaggtgctcagtctgaagaaaactttgtcagtgtttgtagttgcatttacaactgcttaaactatattgatttcatatatatccaactatttatttccaaagaaaaagtttataaataagctggtcatcctgtgtgtttagttcctcagtgttagtctgactacgaattgttgacatggatacaaaactaccaagagaaatttactgctgcataatttcttgtcctaatttctcccatacttcaatatctaaagaatgcctgctatatccatattttcatacaaatcatgttgcattgaccttatctcctactgtcttaaagagatcaacaatgaagaaatattcagcatagatgattgtattgcattagaacagacaagcagagaatgattgaaatttcttcagagaacatcatcagtgcttgctttgaacagttctgcatgtaaatcaggcaaaaatggtcggtgctcaacttgtttctctagtggtcaaaggatgatcaaaaacagacaacacagtaatgctctatttctaccatcattaatgcaaacctaaatcttattaatcaatacatatatgctctaaaagtaacatgtagttttcattgagaaatgaaataaaatgaaactaagcaaagcaaatattatacaatgaatatcagtatacatttcatcttgtgatttacatggactgctaaaaatcaatcttaagtacttggacttaaaaattaacagcattttggaactcattgcaatatgaaatctatcctgtctcaaatccccaccccatccctgccatgccccttcaacacattctaaaatgatttttaaggtttaaggttaccaataaacttctgatagttaaattattatataaaaaattagtgggatgtttctatagtttagtatggtttcaaactcactgttatgatttaaaactgaagtgtctccacaggctcagtccctatcttgtgttatgtactccaagagcctaacccttctggttggttcctagtacctaagtactaaatgttatttggatgaatggtatacttttgtttccttggttgttgttgtctcagggtttctaatgctacattgaacaccatgacaaaaaagcaagttggggaggaaaaggtttattcatcttctgcttccacattgctattcatcactgaaggaagacagggcataaactcaaacagggcaggaacgtgaaggcaggaattgatgcataggccatggaggggtgctgcttactggcttgctcacatcaattgcacagcctgcttcttatagaaccaaggattatcagcccatggatggcaccacccaccataggttgggccctcctccattggtcactaattgagaaaatgccttacggctggttctcagagaaaatgctttatagctggaactcatggagacatttactcaactgaggcttcttcctctctgatgactctaacttgtgtcaagttgacaaaaatcagctagtacagttgtacttttatttatcagaatttcaatgtgaagtacaaataatgaactctgatagcatgtagacacttaaaagtttacacagagagatggtgatgaaatgactgtctcctacgtgttgggaggcatttctctcagccttctgccatacagtattgattataaacatacaaacacagattttttttaaaaaaaattctttttttccagttttacaaaactgttaaagggcatctttaatgattttatcttcatgaagcagtctcaccttccaatcagaacaattttctcctctcaatcaaaccttcacattcagctaatctttataagccttccttgaagggcaaacatggaatattaactattacccaaacaagaaatttacccaaatgggaaaacgatgaacataacttaaagggcttcagctatgaatttcactattgcccaaagcttttatgaacaactcagcattgagtactgtactttctctcaattggttgaatttcagtggctaccaatttctattccactagcatacaataattttaagttcaaacacagaataatttggggtagtatagactagtgaactcaaattataccaatttatattaagtagcatttatatatctaatattaatttttctttttttttcattacttgcccaaaagctttatagctcatgaagggaattcaaaattaatatacctactttatctttttctagatcaagaaagatatgaagggaacatatgatgatgtgatcatcttggagggagtgatcagacaaactgattcggattaccctcagaggagttattattctccctacccatactgtctgaacagagagagaaggatgacagtctagttccacttgtcttgtttcatttatgtatctccccactgagaccagtttcctagcattactttatctgttgttaataaaatacaaaaggaaataaaaacaacaacaataccactaccaaaaaaaccccacccaggttaatccagtactttctgatttttgaggatcacggtgattgtcccgttattaaaaatagtgaaaaccaaaaatgaactgtagaaacaagctaattacatttatggtttttaatcaccttctacccaagcctcatgctcataaaacaacaattaaaatatttaatattaaacacagtgagagtccttatttctgagtttttcaaaacttggttattttaagatacacttatagggttaaaacttgcaaactttttacacttggggcttacataaattccacacaccaaccgagatcagctgagaaaaaacatcttcctgagaaagtttagtcttcctgttttagaagagggacttggcatagaacattcccatttaccaggctatgacagcaagactgtgtcttacctggattccttggaattcgctttcttcggtctctaaatgctgcacctgattgtagggcttccagaagattatccatcactccggtctcatcaccctctggaggaccagagaaatcagaattaatcttatggcaattaaagttaaactacaggaaaataaagggaaaaactcctgtcagatttacataatacccttaaattaaagacatatatctgttttaacataatgggtcctgtcagtttctggcatcacagactactttgcttattacgcaccattaagcaaaattcatgccaatcccactgttctttcaacttaaagaccttgtcttttgtattattgatgacacactcagtatgcaaataaacagtagctgatcagctactgcagccttcctgttaagattcttctaagatattcctaagcaagaaactactgacctggcttaatgcaatcaatgtgcagggcgtgatttgatgaagcagaggtacacaaggttaaatactgattgtattaataccttcagcattcaaccatcatctgcgattatctcaaaaggcactatttgcaaaacacatttgcattcaattcttatctaatccatatcctttattcattttgaaatgctgacattctataaagaaaaggtgaccacatcatctgaaaggccacattttatattgagagacatcagccaaaaagtcttctttgctgtttagaatgctggtgtgtgcctaaaggcttttcttacgggcaagaactattagaaatgagaatggcaggtactcagagatgctgatggaattccctaacagagacaacatttaagactttacaccttactcttacctttgacaactctggccatcaagcacactcctgatattcgtaacaggatttataataaagtgtcaattgacaggactgttacagggacctgcgctttctcatgccaaattgtctaactgctggaaagaaccctcactaggtgggtactttgagctaacagtatagggtctagagtatgggttttgtaggcaggaaggtaagaaaaggtgaggaagaggtgagggagagaatactgtctcccattccagtccaaggttaaacttaaatcctactttgccttaagcaggcagtattacattataggacaatttctcttataggataagaagaagctaaaatcactatgcacttcatttgacttgaaatgttataattatttatccttttaaggtatgctacctaggacaggatattgagtaaaaatgggaagaaaacacagaggttttcagagccaatatcttgtgaaagtgtaatggagggagtgtccacagtgattagagaaagacagctgcgctttttaaacattaagatcaatgacctatttggatcatcacacaatatttccaaaagaaagaaaagagcaacaaagtagttaaatagttccgtatagatgcaatgtggctgggataattaaatctcatgtataagatgctttaaatttcatataccttttcagataggaataagaaaaccaagacaccaagcagatggtatgtaaagggatctaaacatgaaccccaaatcattcatattaaagaaaacatatttaaaaataatgatatgtttgacatacttttatcaggctgagtgttagaaatctagtgcatatgtacttttttacacttttccggaattcaggtgttcaacagcacatatatcatgtggacaccatattgggcagcacaattaaaacaatgggaatccattgctcaaacttgagttttagagaggcttgccaaagagaaatgtggaaaaccaggaggcagaaaaatgtctaagaacataatttatttgtctaagtaacaaaaaaattgaaattatcaacataatcactaagactcggccagggacagagaaggctaagcaggaaatgagtgtggatgaatagtaataattaggcttaagaaaatctgaggagctatgtgaaatgctccaggaatgtccccagttgtgtgtatgtggaagggtgaatgtgtgcacgccacagcacacatatgaaagccagaacagaacttcaagtgtcaatctttcaacaatattagagacaaattctctttgtcgtcgttgtgtgtttctcccatgatcctatttaacaggagatttgctggtactagagctttgagagatttgcctatcatctcttcttctcacctcagcagaggaattctgggattatagatatttaatttactgtggatggctttgacataggttctggggattccaactcaggtctgctcactttccctttcacagaaagtacttctatccacaaagtgctctcctcaaaagtcagggaaaggagaaggataaaggtgggcaagaaatgttcacagctaaagaacaaataagagagtaacaatgcaagtgaaattcatgtggtcttgtgaaatggtaattataaagacagtatagacgagtatgtgtaaacaagtgaacagaaagaatacaaaatggcatctatttatggcttctataaattaaattaaaacatgaaattatatttatagatattgtttcattgaaattctttaatggtatatttgattagactaaaaatgtggagcataaacacaaagatggcaaaaataaatcctactacttaatttagttgtatgccacctgacaacatttattgaaatattaccttatagtatctttcttatctgtttctcattatttttccctccctgatttgtgggacatttttatacatattttccccaatgttcacccctctaaaatgtaaagtcatggaactattgcttatctattcatgttatctactgtttgttaatctgtgccacaaaccattgtgttaccaaagatttatatcatggtgcttctaaaccaggaactgaaacagcaagaacagttctttacaaacattttgcacgtatcaattggaagaaatgacatttcttcagttcattacagtttcatttgttccatgctaattttaaaaccaattttcatagactgtctatccttcacagatctaagttttacaaatataaccaattgacattgcttcctaaacccaaatggaagccaatatggtcacttaaatatattacctttcattttgaatgaatttcagttaagtttgctctgtgatttaattgtgtaaacttaacagttcacttagaattcaccacttcatataaccatggtttcttatttatatgtaattggtggtaatattttattgtatatggagttaactcagaaaaatgtgttcctttttattgtaaatgaaagtattaaacacacaaaattgcttctaaaaataacttacagtggctattttactgagtaaaggaatatcaagagataattttctaatgtttttagccattaaaatgattctatgtgggcatggctgagaagtaacgtttcatagttcactttataaaaatcatcacacagttagtttcagagaatagcaaggagctcggtgggctgcatacagtttcaggactctatgagtagcttatcatctgataaactcaaaggcctggctgacaccttctgtttcatgtttcccatggtatttgtcactcagtggatggtaaagctcagtttttagcactaaagataacctatttggtattgagttatttcccccaaagtgtttggagatgctaaagattaaaataaacacttggtaaattaatattctctgctatacttttgtgcaaaactattccctgatggctagcacatacttatgtgagagaattctctatgggcttctcacaattttacacatttttaaagcctatttttatagcaatagttttacatgacacggagcttccatctaaagtaaatggtaggtttgtctgttttaaaaacaaattatgtgttcctccagggcaaatgctatgtagctttgctttgagtccatcataatatattagggattttctaagattagggctcctctggagtgctacaaacccactgtctgtgtaacatccatctggcagcacctttgttcccctctattgaagctggagagcaaggaaaagaattaagaacatgagaacacgtatctcacactacttactatactatgtgtagcctatgtacactgtgtgtatttctgacctctgtaccttctaacaacatccattaagttgtagcatgctaatttattagctacaccacttttgaaacgattcttattctctgtttttgttcttgtatcaaacattgttaattagaaaactccttttgtatctagtaactgaacagcatcttgggcactttcattattgaagactgtactgcagttcactgggcttgagaattactaacttaaacataacacaagttcaatgtagtttatcttaaatgcttaggaacaggtgttttgggtttcacagtctgttggattttataatatttgcatacagtttatcagttgagcatacctaatccaaggcccaatcttttcaaaagtttccaatttgggagcagtacagattaaggatgtcatttcctagaatcttaaaaacctgatcataatggattcattgttgcttcgtcaaattttcaattttataattaaagatctctgtcaaaactgaagaaagctgctagcaactagtaacaagtaggcccccccaaaaaaacaaatgcttcttgctgaggtaggacccttctatgtgacataatacctgcatatattaattttaaaacttaaagtatacattatatgaactagaagggcagggaaagacataatgaatgaaaagggcctaaaccaagcctccaaaaacattaaatatctgtagtaatttaggtattatagttatatgtaaatgaaacagaaatagaaccaaaccaccaaaaataacaaccagttcaaagacagtcaaatcttgagtgcaacttagtacatatgtgtgtatgtgtgcccattctctctttctgtatacaatgcaagtgtaaaaactcacaaatactgaaatgcacagatcttaggtgtacagtttgaactgttacagattgatatacccatgtaactaccaccatactaagacacaatcactttccctttcttatccctaccaccaaggcaaacctctgatactagttttgactgtcatctgatattagttttgacggtccttattatatactttaaaagagtgttttaagatgggtggtggtggtgcactctactattcccagcacttgggaggcagaggcacttcgaacccatcctggtctacaagtcgagttccaggacagccagggctacacagagaaatcctgtctggaacaaacaaacaaataaaccaaagtttattttagtatttattttacatgtatggccattttgcctgtgtgtctgtaccatgtgttgtgtctggtgctcatgcaggccagaagagagtaatggatctgcaggaactgtagtttcagatggttgtgaatcaccacataggtgctggtgatcatactcaggttttctggaagagcagcaaatactcttaactgctgagtcatcaattcagccacttttcatataatttttatggtgcttgggtttgaaacctggaccttgtgcttattgagcaagcactctaccactgaactacatccctagttccaaaccatacattcctctgtgagtaaaagagtagagatcattttgaatcggcatagtcacttgaaagaaagcaagcatgccctatcaaaaggcatgagggggaaagttgaagatccccatttacaatgggatggaaatgatcagagcatagatctaaacaggtttcattaacacagtaagaagattccaaaggtgccaagtaactctgaaaatccatggttagattttcagtaacacaggaatgcgatgagggtgacattcaagatcagcctcacagcagcatgcaaaacagaccagcttgggagagaaatcaattgtattgttaaaaaagaacagaatttaatccacaatgacaaatactgttctgcatacaagcctggaccaagctcgtccatttggacacttttgggcaaggcctaaggagaaaagtcaaattggttttgtgaacaaggtcatcggcagaagtaaatggaagctgacagcattagaaggcaatgacaaagtggagggcaagaaaaatcagtgttggattcaatctttctcacataatctatcaaggtctggattaagaacatgtgcaagatgtatggatttgcacatgacatggaattagaagactgctcacttatcaaaaagaaggaaacaaaatcccttctcaggaatctacaaaaaaaaaaaaatgaaggccctgggctgataaatggatcttacaattgaacgtggaaaaacaggaggaaataagggccaactaggaggcccatgcaatatggtaccaatagcataccatgctgcaaacactaatatctctggataagtgtaacatgagagagtcagaaaaaagagaaatgaaacctcaaagcacttactccacagatgtaacagaagcctgaacaacatgttttgtagtccacagcacctagaacgcccgtatctgatggcaggttttgttagtttgtggtttaattggaatggagttaacagtgatttggaaacaccaacagatggtcactaaaataatggtctatgaagtccttcacaaccagagagtgtggtaaaaagaatcacaatgttattccaaggagattaaaaataaggtataaatagaaagcacagtgatctaagaaaagtgatgaaggcagaggctcctgtttaatagaagaaaaacatgcaagtgagaaaaaaggacataggagcttagaagaaatcactaccaaccctgagctgagctggggctgtgcaacgattatactaagcagtaactaatatttgttggcctcccaggtaatagccttttggagaagaaaaaaaaagcagcatcaaactcctgcaattaaagttaaaagtattcttggaaaatgttctatagacttcactcattttgttagcttatctcattgtcagaacaggtatccaacaggtttcccacaatgaaataaaccacagagtccacataaacttcaaagtgtatagcactccttctaaataatttcaacttaaggttactgttttagtttcttatagtcatggagtaaatttttggggggtgggggatggatgtcataagataagtagacattaggctccaaactcatgaatgatgaatggttaattgatttttccccaaaatacctacatgttgtgtgctatgtaagagtttatcagggaaatcgagttggagaattaaatggtgcctgatgtatttgcatcttaaatagaagcttgttaacacaaatgaatggatttctaatggcagactttctgtggaggaactttttggccagaggtatatttctggcagcttgccctgaggtaagagagcttaatagcatatagtagttaaaaataatgtttatgcttattcatttctttccttcagttacctatatgctagaagattgggagttgaaaaatatgcattctataaataaacaaacgcccaataaacctggatgtttacatttaccagaaaaaccactgttgatgctactggtaaaatattgcacattcaattattttaaataattaatatttcaaagagatctttgaaatactccttgtgttttatcagaatcaatcattcactaagggcataaaacactggtgaaaggaaaagcaaggaaagcgaatctttcagataagacaagggtattttgggagggggaggaatattggtaacatctagcatttattgagagccttgtatattccaggtgatataaatccagtttatatcaaatcctatttagttttccaggcaaagaaactgaagcaagcatagataaattaacttgctccagttcacagaactggaaactgccagacagaaccaataaaagaacacagaaatgccttgtgtagggacgaaccatagctctggtggctataactatcatcacaagattcttacaattcacatgttaaaaacaattctcatatctcgcatggcttttaaaagtaaagaagatatcctatgctacgtaacaatgttaacaattcaaatttcagtcccaagtcctatggaaacacagccactctcattcattttgcatcatttatggtggcttcgttgctataagaacagattttagttgtgacatggactttgtggcctgtgaaatataaaatatttatcagtcagctctttatagaggaaggttgcccatgcttgctctagagcacatgttgtcaatgtaaacactatatggatcttcaaatttgcttctgagttgttgaaggaccttggtgagggccagtcaaataaagcaggttttaccatacaggaacgtaactgagaacatcagcattcaatataaggattgagatgcttcctatttcagtgcagagccaagcatgagacagctatgaagtagcaatacatacatacatacacacacacacacacacacacacacacacacacacacacacacacacacacacacatccttttcctgtctttatctactgatgcacactacaatattaaattgtgctcacatataccagaagtgcctgccttccactcctttactgaggcaagaggcccaggcatccctttatgctttgtgctcctctgatagtttcaaatatgacagcattagaaggcaataagacacaggttgttttcttatttgaagacagccatctagctacaaggtaaaatgcatgtaagttatagtttggattaacagtctcttctttcctcagtttgtcctttctctgtgtggcatagatggctgagggactaaaggacacaaagtcttgtatagagactttacatttaaaactccttccaagttttcccctgctattagagaaccctttctctcactgatgctaagcactttcaattgacctatataatttcttacctatcaaatacaataaggtataataaacgtcatcatttttatatgaaaaccaaacacaggactaataatgagacagaggaaacagacagaagggttaattagggcatccagagcataaacttgaggccaaatgcacttgttacaacagcacaagtgtggagtggaaatgactgcaaaaactgccattgtgagagtgtacccaggcagttgtcataaatgtcctgcatccagtggtaaaggtagtccaaccaccaagtataaaaatgttgtaaaagggaactacacctcttaatggctgatggttggcatgcaagaaacagtggacaatccatcagctgtcaatctaacttccaaattgtagcattcttctcttgcttatcagattctataatgaatcaactttcccaccaacttccagcgcaattgcagaaaagcaattaataacttcactgttgctactagcatatatttctcttcactccacagttttgcatagcaacttaagtgatacttatcttttaaaagcaggacgttcatgcgcatatgatatttccttttttacataaattaatcttggaaaaaatggtgtgttgcaagagtaagaaggttgtcacacacatgccatggcacacttttagagttcagaggacatctttccagagtagattctcacattccaacttgttgaggcagggtttctcttagttctgttgctatgctccataatacagctagctgcccactcccaatcttgccttaaagtgctggccactaattctggctctttaagttggttctggggatcaacctgagctcacatatctagtactttatcctctgagccacctctctggatcctgtatttttctgaccatttcagctggagagtgcacactgatgcattctttttacatttccaattcattaacatactgaacatttttaaatgtagtttttattagccttggcagtcctggaatttggtctgtagaccaagctggccttgaactcacagagatctgcttgcctatgccttctgagtgctatgattaaaggtgtgcaaaaccattgaccagtttagcacctgtattgttattaccaaataaatgcaatttggcacctttctttgttattcagatacaacaacatactctagatgtgcatctagttgactgggccagtgaacctttgccagaaactcagaattaccatcttttatttttttaaagattatgcatatgtgtgtgcttctgtttgtaggttggtacttgtgagtgcatcaaaaaaaaggtggaggctagaggcctcagaacccctgaatgtgaagaaatctgacatggctgctggactgaactaaggccctcggcaagaacagtaatacttgctttactgctgagccacttctccagacccaataccagacattttaatacaagataatacagaattttctcttttaaaaagcaaaatcagtttgggggaaaaatcaagcaaaaacaaaacccatgcatagccacatgatttactaaaaactctcacttaagaatggacataaacacaaaactggtttgtttgtttcattggttggtttatgtttttgccatcactgcttctagacatgggacaccaaatttatcttcctagtgattttggtttgtagtttctgtattaatcttatatgtactccaaagagtattattcactaactattgcttaattatttggatatgggttcctgaaggagccccactcacactacccttccttcttactcctgaagagaaagaggagagagaaaagagggaatatctaccatttaaatgactactgctttaacctttattttttggaaaatgattcagtcagtataaggatctgtgcaggagtaaggagaacaggaaatagttctgagcagtttcatggtcaagtgtcacagtgaactgatacatcattcaatatgcaaccaagactctccctccaagtacaacagtcctattgattcactcctgttatcactttaatgttttgttgttgttattcctgttgtattaaaataggggccatataggcattccaggaacttgagtgatagaattacgggcaggtgtcatcaaatcaagctaaataaatactattttctttctttttgcagtggtgggcatcaaacgtagagcctttcatagttctaataagccttgtgctacctctccagccctttaattcagtatctttgatgtcgattcttatctacccatatattctacacatgtgcaccactgctaacatttacttttattatctctctagtgacttgctatcacttcatctttgtgtctttgagtctacagccacctatgacacacacacacacacacacacacacacacacacacacacacacacacacacaaaaaagaaaaaaannnnnnnnnnnnnnnnnnnnnnnacacacacacacacacacacacacacacacacacacacacacacacacacacacaaagggaagacaaattgattgaaaggtggtgaaaatgattttaggaaaactgttcactttgagctattacttacaggcctaataccttatggatagctgtcttcttgccccatttgaaaatatcagaggaacacaaagcatgcatatcaaagcataaaaggctgcctgggcctcttgcctcagtaaaggagctgaagatagacacttctaacacacacacacacacacacacacacacacacacacacacacagcccttcgatggtggagatacctacacttacatttacacaatgaactctctttcctttgaaggcccaaattaccagttatttcccaatactctcattcacaaattttcacattatctaagatttagcacgtctaaatcttatttaatcatgaggaattatttaccacaccccttaattactttttatcccaattgtttcatttctcttttgtccccagacctggaatctgtggatgttctcttacatttttttattcatcttcaaaatctgtgagaaatttataccgaaactttccctgtagaatgtctcaaataagcatagctttcttaactgaatcagtcatttcttaaccaagatcattactacttgaaaacaacaacagcaacaacaaaaacaaaaccaaacttgctgaatttcatgattgaagtgtaagcctttcctaagagtcagtgcttatcagacgtgttctaaaacataacagaaaataaaatcactttttatttttccttggtttctgctatgctatttttgtttattatttagtatttatcttgagtggtcttatctttgtacattcccttgtgcatctcatttaagaaatgaaagattaaaccagattctttatacttaggagtttaaatgtgtatacatttaaaaagattagtatgtgaatatatttgagtttatcagacctatgtaagagtacacattttggaaacatatataaaggtaattgacaagttaaataaatatattaaccatagtacattttattaaataatttaaattcagagaggcattaattatatacctcacaaaaataaaagggaatttagtatacaataagaaataattaattttaggataaataaataaaccccctaaggcagaactcagaataaattttaaatacctctattactatttaatttaatctaactgttgaattttaaaagagaatacattaaaagtaatgtggtaagtgtatattagaccttttggtgttttaaataatcaaggcaaaaagaagtaaccccttcagtactttacagtttttacttggtgaaaaaagtagtctttctggcttcaagatttctaaaattaaattcttcactgtccatgaacacagacagggcaatataacataagatagttccttagagaaaagtctataattagacattagtgagcaaagactatgggtgccattgagttatatgagttgattggttaaaagaaaatggtagagaactacaaaattaggcaccaacaccttggctatataatcatgtcaatttctgaacattttgtgcattttttaaaacaaagtcataggtaatattattgtttaaataccccactaaaacctagtgaaaccagagaaaatgctggcatttaaagattatcattccttagaatttaacatcacaaaagcccgagggtgaaaagtttatttgatctttgtatcactttgattttaattcaggaactcccatggcttccatcccattccatgctataaagcaactatgtcctggcatctgtttgtagactaggctggcctaaaactcacagaaatatgcctggctctgcctccccagtgctgggattaaaggcatgtgccaccatcacctggttccataaatatctttataccgcatcacaatgaatatgcctgtatagtcaggtagtgttttgaaaaaaaacattatttatgtatgtaggctttagactcagactggccttgaattcctcctgattctcctacatcacttcctaagtgcctggattacagacatatgccatcatgactgataaaaatgtgacctttttttggggggggggggcttgggactgactggaaaagatggctcttttaaaaacagttggctccagagaggacagcagagagagctgtgacaaggaagcactgcttcagtcaccattccctcagcatgttctttacgaagttgccattgactcttccaagataccagtgcagaaccattgggtaattactcactggacaataccaagtcaaacacagaactaactgtaagggtcctcctaaggttataggtgtttgctcccatgatgcagttcacattggaagggagtttgctttttatttgtttttattttttcttttaaattctttattcattttatatacccaccacataagttgaggcaggaccaagcccctcccccctgcatcaatgttgagcaaagcacctcaccacagggaatgtgtgccaaaatgtcagctcctgcaccagagataaatcctggtcctactgccaggggcctacaaacaggccaagccacacaactgtgatccacatgcagagggcctacttccttcccatgaatgttctccagctgtcagttcatagtgggctcctgcagctgtctctgtgagtttccccatcatgatcctgatccctcttccctctcttccactggactccaggagctcagctcagtgctaatttgtatttaatgaaaggtttcactggttaagctgagtaaaagtaaattcttcttagaatgtctctgcttattttatatgtaacatgtcatgagagaaaaatactgcatattaataattaatacttgccaactttctgattatactttaggcatggatcaagtacttgcaggagtcaagggtctaataagactgttgttttagtatggtccatatgttgataaaatagctcagactaagctacctaaaggagaaaactagtgactttattaaataaggtatcaaatactttacctggcttgcccactcaacagtaataacttttactatttataattagttttttaatcttcaaataacgtgctttaaaagctggcacttgccaaaagggtaggagtgaggaggataccaaaagctcttgcagatttaggtcaaggcaatagtgtcccttttacgatttgttcatctaagctcatcactaaagtctttgcatactatctgatctcattctggacgctttgtgtcctatttatagcctatatcaagagagggaaattgcagtccacggagaaatgataaggaccatttttcactcagagctctcatggcagctagtgatttttagtataggggaaatttatccccatccttccaaagaaatacactacttgtgctcttgtgacatgtgagattctgggtcttttataggactatggcttctatggtagggaaaagaagaaaagggatgcattatgatttctttaaaggaattactcaacccaggaggctttaaaagtttcactatgtttgttttagcaagtaagcatgcatattagcagtgccttcaacaaagaagtgagagtatgcttaaggaatctgttaattgctgaaatttggtgatattttcaagtttacgctgaattgggagggcaatgaaaaagatataactcctacatcagagtcaatcctggaatgattaagatgtgcttgatggattaatcattcattcagtcataaagtatgatttggatacttgtgctcaggtattcaaatattgctcgatctaattagaatgatcatagcatattcatttggaacaaagacaaaaacaataataaattaacaaacaatactgaatatttctctgaagaaatactgtacaaacagaagaaatatgtccatggaagaccaatatacctttaggtaactctctttgaaggtgtgtttcccagtgtggccttgcagtaacacgaagagagtctttttacttaaaagttcactttaaatgccaaaaatctgcagtggaattcttttaaatgtcaaatagcctataaatgatcaacaagggtagagcagattttgagcttcatccataaccaaaaatgattatggaatagtaggatgttccttttctactggagaattaggattttattagcttgaactatatgaagctggcatttttataggtcaaaagtggtcaaactgcagtaatttcatatggcttgaaataagatttagaagcacaattaagccaggtaagctattactaaacctctaagaaaatatttctaaacagcagagaagcaggcaaacacaaatgggagacagcacaatgtagaaagcaattctaaaatagtatcacttgaaaaacatgaacttctaacagttcttacaatccacaacaacaaactccatattttaagtctgcatgagttactaatgcaaccaccatgacaacaagatcacacagcaagccaaaacttggaacatcaccagctttctctttgagctattattttgatgatggagatgctgcccatttttacagatgttaattctttttgtttctttcccttttctaacttcagcatagggatacaaggcagcttatcttgtcattttaatgaaacatctttgaggtatgatttcactggggagagatttagaaatcaaagctttagcagggtttgtggaaataagttaatacagtactgagaaaaacacaatctccagaactcattttttccctcagcaagcattaatgaatgtcaaacctttatagattagttaatatacttagagatagaacatacttgtttatttttctgaaaccataattcagctagtacttccatgagagttgaataaataaatccaattattatagtggttttcagggaaaaattcagcaatatttgcaaaaaagtgaaatttgctgttttctactctatgtacataaaatattgacaactgttttaatattacctagcaatcaatatgcctgccacatttgcactcttattaattgcaattttatttttgtgcacttgaatttatcagataggagaacaaaccaaccaactcagttcaagcaaacatctaattacatttttcatgctctttgtcattttggtgagtctcctgtaaaagaacgtcagcatgacttttattaatgtcagagaatgcatttttttcttttgatagaagaagaaaagacctttcacattcagaattcaattttttctcctaacatttccaatgacacaaacatatggtaaataaaattattctaataaatattagagccagtggaccagtgagagagactctgagcatgctgtgaatatatcaaaaaccaaagtgaatctgaaatataaaaatcattgaacttttaagaaatactgaataattcaatagttttccataaaagaaaaaaaagaattgtaaacaataataatgattagtcgagctgcatctatgtatcagagagagcttggaaacctgatcagaaggtttccaagtttaacacactagttataaaagtctgcttttgctgggtgtctgcatcgtatacttttaatccagcactcaggaggtaggagcaagcagatcattcagtttgaggccagcttggtctacacagcaagtttcagtacagccagggctacaccctgtctcgaaaaaccataagataaaataaaataaaccaacaaaagtctgctttcactgatgtgagcagatccagaaacccacagccaaacattaggcaaaaatagagcccaaactggagatctccattgggtcttcccagctcagagctcgggggaatcctgtcgaagcactaggtcctctgcatatatgttatgattatgtagtttggtgttcttaaggaatgcctaacagagagaattgtgggttgtgaagtctctgactcttttgcatgctcataggactctcttcctcttactgggttgcttagtccagccttgacatgagggcttatgcctagtcttattgtatcttgttatgccatgtttggtggtatcactgcaaggcctgctcttttctgaagggtaactgagtaggggtggatctgggggataggtgaggtaggggggggaggactcagaagattggagagaggggaaactagagttggaatgtactgtatgagagaataattttttaagactgctttcagttttctcaccaagagtataattacagttgggtttaaaaacaaaacatattggccaaaggaaagaagtaagatgcatagaatgactacaataaaatgaaggaaataataagtgcattcaagaataaaaatggaacttgtaaggaaaagaagcacagttcatgtttctccaaatatcccttactgtataaggatcatctgtgcttttacattgttgtcgtcatgagacattatgaaatatcccctttgtcttccagagttatatgcaggcacgcatgtaggtagaaaactggagtagaccatctggagggcatactaatgtaatatgaaaatcaagccatagaaaataaatccaaaggattgatattgttcaatatgaaccccatattaagcacaaatagaaagacatgagattccagaaaccaaagttactaaccctatggtttggatatggtttgactatccccaccccaaaggattcatgtgttgaagtttaatccccattgtgaggtagtaagggtgcaaactaaaaccaattgtagtgttaagaagtaggccattagggaggtgctaaagcttagataagaatagaattgcgtcattgaatgttcatggctttgtcagaaaatgatgataaagaccagtactaacagatttacattttctccacttctagttacatgaagttcccatctcaggactctgtcactgacaggtagttcaccaggttcaccactttgtatctctagaaccaaaaacctaaataagccccctttcattaaatcttactcattctgggttattgttttattagaaacagaaaatggatgcagaaattatttatagacaatgctttgttgatataatgccttaagccactagggattaaaaagaaaggaatcttggtggtgaaatatatgagaaatttgaagccctttgttgtatgtaaagtattcatcagagaaaaatgttcaaacctactttaaaagagatggaaactatttcttaatatatccaaagagggctgaagattattttttgacacaagttctcatgggaaaagctctctcttttttatttgctacagagatcatgttagaattgatagaaaaagagattttaaaataaataaaagaggtcacttgcaggaggagcttttttaagaagtggggttttgtgaaaagattctgacatttgttcaagtcaaagtattaattttatttttataagcaaggtatgcagatattgctccttttggtactcctattacttttgtaaaacaggggctttgtgtgcctgcaaacttcatagtcagggacaatggccacttgtgcaataacacaggagcccttgctcctgagagccctgaacatagtgctttactaaggccatcttgaggtacttcataatttgtgatcaaattattggatgcaattgtggcaaaataaaatgtagcataagaatttatcttgattttccttttttcaaaaaatttccttttggacatttgataagggaatataaagcctccacaaagatgtactacttatgatttctgataatttctaaatgatattttcttttcttttacatttataaaatcctattaaggaagaatttcctcctcgttaagtcacttctctgacaggcttcataagtttttaaatgcaatcaagtgtgattcagtaagaaaatggtctcaatgacccaattccttgtcattgaaaagaaatgcttattaaaaatatatatgaaagtgtccattaagagtgaataaaagacccttaaagtacacatacacagattatcatagaagaagcatggtgataactggtagaaggtaatgttcttttttaatagatatattcctgaacagtaatacaatcattatctatctcctttccattatgaaagaattctattctaacataaaaatggaaatgctacttaagaaattcctctgcaattcatttttacaaactaaatccacacatcagattcctgaattcattggcatgttgtggtcttaaaacatagctatatgtatcaatgagaggcatactggataacagacacctggggtctcagaaacatgcccagtatcaagagtattgtctctgctcctctctccccaccctcagtctattaatgtctagggcaggtgggagagctacccctgtggtcataagagcaaaagagctgtccctgaaccccaccagctacatcactaagggatcaggccctgcatttttccagggcaccataattgagctaaaactgttagcgcagacgtgggagagccagccctgaaattgtgatcatgggaaaactgtccccattaccctgtcttgtggtgacatgggggtgggagaattgacactccccatctacacctgagataggtgggagatagaaccatccctaaacccccaccagctgccacatttgggagagaaggtcctgtaccttcccagggcagcacaatagagccaaccctgttagcggaggtgtgggtgagacacccacagaaatgttgagcatggtacagctttccccatttcccatatggcagaccaaccctacagctgcccaggctcagacccagagttatgacttggcctgccccaacattcatcccatctatgatttgctggagcacgtgaaaagatctgatccacagatccaaagttgcagcatctccacaatacaggtggccagtgggatgtccaaaaagagtcctagctagaggccagcatcaatagtgtagtggaaaacagggatcttgacccagaccaatgactctgcattgaatacttccaagtattgatataaggactaagaagtatacagcatgactattgggtcacactgctgtttccatgatgagactttgcaatttcttcccttttaaattttttctgcaatttttctcttgaattttgttttaattcaggggagagatgcaagggcagagggtggatgcaaaagggacagaggctgattctcacatgatgtgagaaacacaaagaataaaaaaaagtgtatcttctcattttgtcacagaaaacttctgattctgattgattctgttacatccagtggattaaaacatagaggtagaaaagggtctcttgcaaatgcacaatggtatcatgactcagtgtcctagattgttttcataattaaggacatttgcaagcattgacaatctaggacagtgggaagaggcaagagctctcctcttgtgtattaaatagcaagtgctttgtggccttcactgtgtgccgcttcagcatacttgtcaacctataaaataggatcaggtgtcattggattcttgggttcttaaacttttgttgcatcagaatcaccaggagtcttgctaaagaacaacttgcagtccccaagacccatcatcccacttgcttgttcagtacatcaggatgaatccagaaattctacatttctaaaaaatcatcacgttatgtttaagctattgctctggggactatatttgtgaactattgtcctagtagaattctaagagaagactccaaagtgctaacacctacagaaataatgtttgatgaaatgggaccaatggaaagaatagctgtccttataaggttaccaagaatgagaaatgtctcccaaagtcctgaagagtcatgagcctgtgtgtgtgtctgtgtgtaaattagaggtcaatgttttctgtcttcctctattgttctccaccttattttgggggcagtttctctcacagattggctagacattgggattctcctcactccatatcgagcataatgctcaaagtatctgtatccctaggattctcctagaaaactagtagttattagtttattgctcaattctacattctggcatgacctaattatataaagcactataagtatattatgacatgtggggcattacatttctaggaaaaatttgaactaaccaaatgttctttagaaatggaatgaaagaggaaaaagcctttcctgtagtgcctaatataattgtgaaaacacagaacagagggaaatgcaagcgaacacaaagagattacttaattcatctcaaatagaaactgaattgctgaggcagttctcaccaccttatttatatatcagattgctcacaaatcatgatgtcacctaccaggcagcaatgcatcaagaagtgtgtgacagtgcaacaatgctgaagacagagggagagccacacagcagaatgatgaaaaggcatcatcaagtcataaaagccacatggctgtacggataaatattacataaaagcattacatgataatcagaaactcgtttcagaaaccccctactaccaagaaagtaatgtttatatcaaaggacttatatttggtgaactaaaggttggcacttcttgaatatcttgaatttaatttacagatggtcaacaggcaggaatccattccctaccacatttgtgaggcaactctcaaaaaatgtacacaaacaaattgggatatggtctcatttttccatttaaacagtatgacacatgactgcctgacagagttggtgctacagcaaagtacgtaacttccagttttactttgggacctaagcaacagctttacttcttagttcctgtgtatttatttatttgagacaaggctttatgtaacccaggctggctagaagtcaccacacagctcagaacgaccttgaattacttatcatctcaccttcatctttcaagtattgggattacaggtgtaaaccacagttacaggcttcggtgttacttcctttaaaagattttttttttgagacaaggtctcactatggtaaccaggctggcctccaactcagagatccacctgtctctgcctctgcctctgcctctgcctctgcctcccaagtactaggaataaaggcatatgccctcacaccaggctagtttctatatccttcaatcatgctgtttactactgaagtccggagtacacaatattttttcataagtttatacttgtgtgtgattttaacaaggaaatcccatgctctttattatataattgtttacttcacttctctggggcattccaatcagaggcaggatgaagaaagctaggccgaaagctacacacacacagcccctcttactcctattttgaaaagttaggaaagacacagtcctttgtggatttcatttattgttatggttactcaagtgaaaatggatattttcaacatgctctagtcgcagcagcttagaggattacttaaaagtacaggttacatgtactgtgggggatggactgtggttacatttaaagaccaatgcaactgtgtttcatttttaaaggcatctccacagtcccagtgtcaatttcccctcgaaatatgatcagatagcccttaaaacatacctgtattgactaggaacaaagaaaaagagttgcaaaggacagtataccaggacctaataacataatggattctgcttacaatggatagagctctgcctccgaatcggttgccttaaacaagcaaagcgcctttttaagggaagacacaggggaggcagtttcacataccacacctcagttcagtagaaagaggtcggataagcactctgtcctgagacatacacctttcattttcaattgttttcaaataaaaagagagaaattcccttttcaagttggattgtttaaatgcacctacagctactcctgtctggcaaaggctaggcaagctctccctactgatgcatttcaaaaaaggttcaattggcaaacgaaagcaagtgcaaagggtttttgacaaaagaggactagagggaacacattttcctttcacggaaatactgttctagaaaatcagacaaggtagcaagtcaaccaagaatgtataagatactggagagaggaaaaaggaatttgaaaattttcaaaccagcaactgcatagaattaacttaaatatttaggtaaggagagcattataacaataacgggctagccagtcaaacaaaaccatacctttcaccatgcacctcacaacctaaaccagcattctttgaaaatgtagttgtcttaactacatttcacaatatacaaagatgaaataaaatgccctggatcctgtccaatcatcagcatggcttattttagacctacaactatgcagggctcagcaaacagaacaggttaaagcaaactcagaagctctgaaatatctactctgataaagagagggctcatttttcaaaagcaatgtacacttagattccagaattggttctaataaataaaagtattctatcaacagttaaatgcacatttaagacaataattattttttgattcccaaatgaatgatattatcttcttctaggtttttgttaagtagcacatgaaacctatgatttattaggattgcagttagatattctaggttcaggttttaaggtttttctaatatcactttaacaaaggcacaactagtttcaaaaactatgacatgtttttattcccataatttctcactaactagctacgatattttctacttaattgacgttccacatgtgaagggaataactgaggactgagaattggccatttgaaaagaagaaacacaggaagttttcaacataattatacatcatatatgtggaaagacactaaatttacatattgaatgttctgcacactctctgagagtatattcatccatacacatgtagaaccacatgcccgagtcattacttcttatagcagagatacccatggacagaatgcctggtagctaataactctttaagtaggataatagttctgatttgtaacgtaacaatgttatgattagggtgtgtcactctgttcaattacttatgggcactcaataaaaacttgtagaattaaaattaaagaaaacactgaaaaattttcatctggaacaatccttttgcacatttcatgcaacactagattttgttctttatgtagaccaaggcttcaaggacatgctgtgcatggaacaaatatattttttaaaagcattagtagagactcagatggactcagtgcagtttgatggttctctggatctgttaggtgtaattactgacatgaatccaaatgcattcaactgagaagagagccaaattaaccacaatgtgggtatataacagctgttattcatttcataattctctacaataagaataaaaatcttaaaatatggaaccaaagcatatctctaatagtgattaggctacctacaatgtattttggtcatttcttaagtgtcaattttattgttttcacccacctgctccaatattctcataatgtttttcctaatgaagacacatacggcatacatagcaacaaccatacagtaaagaaaagccaaatttgtaattgccagcttaactcatctcctacacaggactgatgaagtcttgctaaatgctcagcacatagaagacagctcttacagtttttatgaatctgaggttctgcatttagaatgtaagaacgcttaatgagacctaagtaaattacctatcttgtttcacatatttatttttgtcttcccatttaaaagagtatttttagtagatgtaggaacttgttttctgtaagggctgatagaatgtgagtttagcacttattcccactgaactgataccatacgtgtaattaccgtggtatgaggccagaaaaaataaccactaatgataaatggctaaaatgtgctacaggaagaaatccttagaacctgataatctagagtatattctggaagtagtttagattaagtacactctcataaactaatgtggtcactaatactcttaaaaatggcccactaaagactataatgagatcccagggacctaccagtaagtacagatcatgcattatctgccccaaaatatatttgactgtcatatgctgtacacttccacttgtataaagtataaatgcaaattcctatcagcagtaaggagattgggagtgtggaaataagggttgtgcattgagaaaactttagaaaggcaatgcacgttaaaagttgatgtgcatatggcctctctgttagtcataaatcatagtaatgaaaagctctctttctttaggatagccagttaaatgctatcaatatcaataatcatcttcacatatctactggaaacaatttaattatttactattatatcgttattaaatgccaactgtattctaggaaaatactcagagatttgtatatgtcctctcatttacttcatatgaaattctcatgaaatggatgacattcctttctctgtcttttaaatgaggaaggtgaggatcagtaaggctaagtttactgtcaaggatacactgtatatggaacactcaggtttgtctggcttcaaagatagggaggtaaattgatttcaattgcaggttaagtcaatgctgagacatctgcctgaggtgacagaacatcaaaagtcaacaggttattagtgattgctacagtgcaaatgttgcatttcatcatgttaacagtgtttaaatttaaaaaattgaaaaactatcaaatcgctggggcccaaataggaatatgatattttggatacaggcctcaagctcaattccaggagctcaaatctcccattgtcttttagatgaaggctggttacttacagatggcctagccaaggtggagaatgtctcctagtttgtataacaatagacctaggccctgagtgggcccacacctatcctgaaggcaagtgactttgtggaatatctgagggcttgagtatgtgcttagaggactatcttgaggattaaagaaaatatttgatatcagctctatacatggtaatagatgtcttctgccagcactcctacttttggaaagctttttaagagaatgtttgaataaaccatggtctccagtactgaccaagcgccctcctgagatgacaagatgtctctgtcttgtccttaatgccgctgggtagctaggaatttccccatccacactcccccactcaggttaggaccagcagctgttctgctggttcccatggcagccccaaagacatgagtcaggaacagatggcctctgtagcatgccactgatacaggccgggccccggcatcaaatgaatgacaccatggcataatgttttatgaaaatggacccaatgatgtttcattaagacaacacagtccaggcccaaggaaatgtctcattcggtagaagtgcttactatacaagcaagaggaacatacttccattcctcagcaaccacattaaaaaagaaaaaaatccatgtatggattgcatgtaactacaagcacaatattgtgtaaagtggagataggacaatttattgggggtgatggagcttatctccaggttcagaagacccttttttgagggaataaggtggaaagtgaaagcaagacactcgacattctattctggcctccatctgttcatggatgtgcacattgtacacatactttagtgtgctaaaagctccaaaggcctgggcaaaattactatattgaataattttgagaaagccaccccaaatctctattgaaaaatgccaacctagagaacaaagagaaaaagctctggttctgaacaaatacagatttctttacatgtttggtaatatagggaacaaggtagtttaagtagggcatcactctgatattcatcttgtctacaaagacaaggctttagtaagtcatgattttcttttagttccacctgaaggacttaagaattaacaaagaaataaaataaggagacttaggaaaaaaaaaaacaaaaacaaaaaaacctctcaccctagaacagggagacctgacttagaaacctaacctaggtcacaatgaccgagtccctggaatttcctagctggcagcaataactcccttacaaggccacaagacaacctaactaaataccaagaattcccagtgggccaccctgccctggggtcgtgaagataagaacagactatcccactgagtcaggagaccatccagccccaaagataagaaatctccaaaggatctgtgactctggtcacctacccaaacccctaaaagcctatggtttttctcctataaaagaagcctgctttagaggaacagggcttttcctttgtctgtcggactgggaggcccgttttcgcaaacgtcccacaataaacttacctcttgtttttacatcagctggactggacattgagtgttttggggggtaccgtccgatttgtggagactcctcgatccgagggtctttcacaccaagtatatgaacttggttaacaccgcttaacatgcttaacactgcattagcacctatgaagcattcattagcatatgtttaatatgcaagaatggtgttgtgtgttacctaagtaatttatattattagaaatgcataaatactgcttgaatagattccatcatttgtggggtattgcatctgtaatttggctactgttatttaaggtctcgagtatgacagcaggaaacatagctttaagccatcttaattttaaaaaaaatgtatgggaaaagagcatttattcacttagatgatgtaattgttttgagttaggtctctctgtctagttcaaggtaccttaaactcaagaccttccttgcctctgcctcataagtgctattattacaggtgtgcaacaccttgcccaagtcaagacatacttattttaagttttagaaaatagagaaaaaccaaaattgctaccaatcattatttctagaatttacttccttgttaaatacagttgaaatttactaagaaaaggttttatataacactaagagcaggcatttggagagggggatgaaagacatgtaagagaaggacagcagtacatgttctccgtctgggaaggctttctggagagaatgtgcctgtgcattgcattaaaataccaaagtgtatgcatcaaaacttgctattctcctctgtgaagatgaagggacctgctcccctttcggtagccataacagccgaacacgtgcttgccataaacttgccttggtcacttagaggtcagccatcagaagttagtcactagaaagtcagatgcctgcctcgtgacaaggaaccaatcagaagttagctggtggcgctatgctttatgactctgggtgtgctttagggacaagcacacagcaatgacgtacggagcatagcaaccaccctgggagggcctatgggccataacaaccagttgaccaatcaacacagggcaagtcctccaagcctggaggtacaccaatagtgagcctgtgcgtacccctagacactccccttacgctgtcctataagatctcttgggaggccctaggagccgtcttttgctagctatccgcaatggcaggtgggtgaaagacccgagctaacatggggttagctcgttaaattacaataaggcctcgtgcagtttgcagcaagctcttgaatccgcctggtgattggggtgacctcgagcgtggcctgggaccccggatacctgagttttccgggggtctaacaaagactgattgattctcatttgttatcaatgtacagaaggcaacaggcaatcctaatttccatatattatataaggaagaacaaaaccattactgattaaataacactttcagcagaatcacagttgtagtttgctattttaaaaatcatttttttgtttatttcccctattgcttcctgcaagtcattgcaggtaatttgctgacttccataaacatggaaaaaagagatttatttacaaatatttggtaagctttctttctctacccatataactaattaatggttttaatggtccctaagttaattattatctgtatcaacataagtacaggttggagaatgcagattattcccagcactttatgtagtttgtatactgtgtatacacatttccaagtacatttattgatttagcataatttttgctgcatgtaaattagctttctccattttacattcaaataaatactatattactgtgcatgctctaattatgattatttgggaaatggtgcaataaatgttagttggatgaatgaaataacctaatacgctaaaagacatcaatatataattatctattggtaaaacagtgcagttctgaaaaaataagtctcttgctctctagaaatactgtggcttgcaactcagtcttccttcattctttcatgaactttttccttcctgctagcgccttcttaagctgccacaggtttaaactcctttgaagaaagaatcagctaccagctaactcctttttcttcacctttccctgttctctctcagctacgtcctcctcgtagtcacctctcctttcttgtgcttcaggcttactacctcagcaaaccctgaaaggattccttcaataacctgggctctcctccctcatcataccatactcttgtgtctcactttcaaggactttcgtaggctgtctcaatcctccctttcccacagttctccaaactcaactgtcttcctgaccacactaacaacagaaaatatccacttagcacgaaagcatcagagactgagaatatgttaaaaggcatcactatatatttgctgtgtaggctagagtacaaataatgcttacctctggcaattttattggttcccacatttagtactcacaactgagaaaaaaaattatagatattatttcactttatgaggaaagtcaggcacagaaagctgcaacaccctgacagagattatagtctagtaaatgatggagacaggacttgaatttaggatctcatcctcttcatcatcttgttgtattttcccacaatccagtaaacatagcttacatatggccctgatacctgatgtgctgctgtgtagcactgatgatgtaatttccatttccttgaaaagcctgcctctgtatagcaaaaatttgacccgttttttcaaggagctcaactaatatgcacagaaactacacttgttcttttccacaaagagttgacattttgccaaaccaaattgatttctccctttggataggcctaccaagcaaataatctctatcatgtatcagcacacaatttcctagctgctggttcagctttattaaatctctttgacaaaactgaaaacttcttaaaggtcggaactattacttgagcatttcttcaatgagcattaaaagactcatcagcatcaacagagagtatattctaggccctgtgttattatacttattatctcatttaatcttcactaaaactataggagataaatggatgaatggatacagaaaaagaatttgagcataaagctaggtggtggagctaaaatggacaccttcttaacagagaagtcacttcttaatcaggctcacaaattacagcacttcttagcatataatacctatattctcatttacagtaagaaatatgattttctgtcatgacttttgcattctgatctccaggtatctaaaaaacggagatttgatacatgatgtttttatgtttctatcttgaacattaacattttcttctcggcttttgtgctatctgttcttacatctgaactcagttgatgatatctggatttcagatacaatcttttatgttataattattcaattctttttgaataattaaatctcaatacatttctccatgataaatgtatataattttgcatgccatattactaaatttcattgtttctatctagtagttttatgagctcatggactattgttctacaataattggtccttttcttaaactgatataaaatagaaattgttaagtagcatgtgtagttagaaatggttaacaagtatatgtagttttagtcaaattataaaaggtttttagttattattaattttgtgttactggaaatgaaaccagggtccttgcaagtgggagacaaggatttgactactgcactgtatcctctattcctcagttactattttaactctatacatttacagggtaccatgtgataattacatttacatgcattcaatgtccaatgatcacatcagagtaactggcatttaaacatttttaccatttttgattaatggataaaattatacatatctatgtgatacatggaactccatattgacatatgagtatattcttcttccttttctgcatcttttcattctttcaacttagactgtacctgaataatcttaagtatgtctttcaaaacttattctgaaatatgaacataggcaacatgtaaaatactatcgaaatgtataataatttatatttgtgacacataggctacaagttaagaagctaatatggaagattactatttgattgacctacatatagtaacagtctttaaaagataaatattattccttttcattttaaagttacatgaatgtctgagagtgggatgtggcatgtgtgagtgcagagcccatggaggtcagaagaggacataatatcccttggaagtagaattagatggttgtgagttgcctgatgtgggtgctacaaactgaacttggatcttctgagagaccagaatgcatttttaaccactgagccatccatctagcatagataaatctcattttaaaatgcatcttttaggctcatatccctcaagttcagcatatgcagaaaaaaacatatttgaatttttacagtgatactagaagatataattgtccgtatcttgatcagatgtaggcatattttcagggaaatagtgaaagactggtaaatactgaggtgaagggagaatttagtatcttccaaaggaatgtagcctggttggcaccttgatcttcaagcctccagcagtggaagataatagatctgttactttaacctaccagtttctagcattttcttccagcatttctggtaaactaatgcttcacaactccaatcttcaagcaaaacccgatacatgtagtttagactgatttcctgggtttcttcctcatgtatagaatggctttttaaggattttccttaaagatctccttcttaaaggtttctttctaagacattagaaaaccgaacatggccaaatgatactcctcattttaaccctcacaacaaaatctgttttaatactgaattttctttctctgtgagtatactaccttcttcagtgccttcacctctcaactcctacatgtaagcaatcattagagactgctagctctgcttttcgacactcatcttgtgatgcttaattttatgtgtccacttgactgagcaacatagttcagaaatttggtcaaacattatcctggatgtttctgtgaggatatttttggaaaattctaactttcaaattgatgggcttgaataaagccaattgcattctcttataagaatggatctcacggatcaactggagatcttagtaatatgaaaagacaaattttgctcaggcaggaggaaaagcatacttagactttgctgtatcctggatttctagcctgtggaccttccttgttgtcagtttccataagcacatgggccaatacctaaaatgtctgtcttagaccataataaatgctacaaacagctgctattaatggtaattgacagaggcaaggataagcataaagaatctgtactcagacaatttccattccattcaacttgttgtttgtgtaccctattgaggcaaattccttaaactgtatgaccctcagttttcttaaccaaacaatgtgacaattatagtgcccactgcatataggtagaaggatgaacttgaaacttgtcctagaatgtagtaaatcttagaacagtgcttgctatatggccaatattataaaagttcttgcaatttttattattgctaaatacagcagggagtgctcactccaatatcaaacatactgttttgtatcttgatcagatttagttttgcttttggttgaattcagggttagggttagttaaccttttagtcctcttagtcctgaaaagaagataggtggctcctttctccctactgtgaaaattactttctccaggaaaacagccatgccttctattcttaatatttcagtgaagacacctgagtcctaatcaccttcctttatctgtccatctggcccctcaataccccatctgtttttagataaagtacaactcattttgtagctcagtctggccttacagtggtgatattcctgtttctatttgcttagtgctgtgactatagatctatgccaccattctgagcattttaccctcgcttccacaaaatctaacaaaaacaaaaacaaaaaaaccagccctacttctaacatatggtcatgtttgctagttgagagaacttgtagtggatattactgtggatgctctgcagtactcctttctccacctggtaatagtgctgtcaatatttattatgacttgacatgcacaagcccccaaggagaactgttgttacagcactgtcaacagatacatgcctacaaagtgaaatgaaggtctgaacctcatctccccagtccagcctttcacttctcatctcactctcttcttcctgatggccttctctagaacgtactatcatagcaaataaatgaaaagcaagatgacaacaacggaacatctcatattgattacgcataattttcagtgtttagtgtagaaggagaagaaataaaaacagcaacatgagataaatctaacagaaagaagtaatagtattagttttctaccaagaagaaaatcactttataactaaaaattttttaaagaatcaatcactttgtactttatgcaactttatagaattcaattgcttttatgggggtacctgaagatagaacctaaggtaaagttcatgctaagtaaatgctctaccactcagcaatattcccagaccgtgtgtgtgtgtgtgtgtgtgtgtgtgtgtgtgtgtgtatgtatgtatgtatgtatgtatgtatgtatgtatgtatgtatgcatatgcatatgcattacatattaattttaaaatagaggctcactaagctgtaacaaattttctggagactgtaatcttcatgtttcccaggcctgtgctgtcacagcatactcaaagccttggaaatgttttcatacctttgtttatatcaatgagctgcttcttcttcttctggcgctctagcttctcttgttcagctttctcttttgcgagttttgccctccggctcttctcttctgtttcttttctcttatggttttctttcagtgcttcctaaagataaaaataaaataagataaatcatggccatcttctacacactataaaatggagaaggtgtgcagtttaaaacttctacaagtttgcagagatgggaaattttcatagcagtcccagagtgtgggcatatactgtttgttggcagagacaaataattagccttaagacatgtcttctggaaaaaatattgaaaataatgtttttagttttcattatgttctgtgggaggaaaagtgggttatctatgttgtagtcttaacaatgaaaatacttttctcattgttaaaatgtgaactacttttgatacacaagcaaagtgagtattgtatctcttattgaaaatttacctgttatctgtaaaatgagttaaaaaaatctacctcactggatatctgtgatgagctatgagatgtgcacttgaagtgctttcagcagagcctaatacattataatcaaggtattttagtctatgatgtggaggtggttgtgttgctggtggaatgattacacctaatgatgcaggtcgtgaaacaatcacctgcaagttttggagctttttatatggtgatactgttggaaatgatgaaacagatttcaagctcttccatatttatggaattccagtgatcgaatacattcctgtacaggatattggagaaagttgaagcaacgtgaccagacgaaataatgccagcttctttggagctcaaataagccactacattttaaagacacatcaactgcgtgttcattgcttcatgttctgtttttcccccatgattatgattgattggatatatttcatagtaagtgcttatgtttatactgtacaaaagtttacactttccctaaaactatattgttccagcacgaataagaaataaaaagacaaaatcccaagaataccccaaggtttttgccttgaggagtctgagtctatactgaatatttttcttcatgttaaaggccataatagtttaaaatattcctgaaaacccctctaaacaattctcctggcttgaaaggattgatttcttcctataaaaatctaactgatttttacctctgtggcatctactaccctagttaggcaaatacgcccctcattaggctaagagcacacaactatctggctactatagacagaatcaaagatttccacttaaatttatatactagattttatatttcagtgcaacctctcaatattagcactgctgtcatttgaggccagatgattttgttgttgtaggggttgccttatgcactggaagatgtttgatggcatctttgatctccatccactagatgcaaattgcatctcttaaaatgtggcaaccaaataggtctcttgagattgccaaatgccactattgttgtttacacagagactgcataagacaaagtccatcaaccttgatccgaagatggggcacacccagggatctaatggaagtctatggctgctgagggagagggaagtcatggttttcagtgatgtggccactagtgggttacccaggagccagtgaagagcttcatgtcctttctccatgaacagctcttcttagtcccaatgtcttctaaagcaaaaccaaaataaaacataagacataaaaatagaatagggacctggtgaggggtgtgtgggagctggtggggatagaggaggctcagagaatgtagagggattagtaagaccagaatgtactgcattacatgaatgaaattatgaaattatactaactagaaaaccaccaagtgctgactcataatcaggttaccttttctaacattggaaacatctaaatgattttttaattattttgtcagggccagtcatttctatgaactaaaaatggcatatacaaatacatagctcatataaatgctacaatttcttctgagtacaaataaagatttaagagagaataaaaaatgatggaaattgctgggcggtggtggcgcatgcctttaatcctagcactgtgagttcgagatcagcctggtctccaagaacagttccaggtcatcctccaaagcctcagagaaaccctgtttcaaaaaaccaaaagaaggaaattttataatacattgcgaataatatatattaaaatatatgagtttgaatggagttactctatacaggagattatactcctctcagaagcaataggtaataaataaaaagcccactatcaggtgtgggatacctccccttgagttgctgggagtcttggaaacctctcaaatagtacaggctactgccattgctcttggttgcccaccaaaatatgatggcaaaacactattgctgaagacagcatttatattggccacaggacatggagaaatccagttggtacttccctgctggctagttttcatagtactggaaggtattatgtaggcatgtggggaataaataattaagagttttactcagttgtgaattctgtgaaggacaatgacaagatatgcccatgggtgcaacagtggcaaatgctatgggggtaaccaactgccttatgactggatgtaaggcctactccacaggaggaaaatcatgtatggcactgtaaatctattcaagaatccatggtttgggagttcacaagccccatagtatcagactatcattaaatttgtacctttccaaccatagattagtatagctctcagaactcatcagaggagtttatttgtgcagtggatagtggctattggagaaattttctgaataaggagtttgcatcattcctttctgatttgtctcagaacagggattcacttattatgccgaaagatatacaggagaacccagggaatcagactacactgccaacccatgggatggtgtcaacaatgtacacagctgcccttacccattttagtagtcctttccagaaatgttctctcctttccttttcaaatttccccctcctaacattttactctactttgcagattgcctttaactgtcctggctgctagtgagtcttctaaaattttgtacattttcctggaagccagatcaaagtgctgtgaagatagaaatctcaatgtattatgtcacaaaggaatgtacaggtaagttgggctgtgctcttatctgttggtttgatatatgtggggtgaaaatcctaaatacttgaggtagcagtaaaccaggatccacatttgtccagattttcaactcattttgggctgataacggcaggttataaatgagaagcttaaaatgagctttgcagcatttgactgagaaactgaagaaccatatgattgcaggaggaaaccactgtagtcattcattagaattttcagcagcaatcatgatcaaattaaggctttccattaacgaaaggaagaaatcctattctctaattaatagcaaacaacattagatagtccttctctatagtttcattgtgcttaaagggcatattggattgaagaagtcacgacaaatgctcagggcaatgagttttcaactgcagcaaccagacttgtagagtcagagcctcttaagactttataagcactataatactgctaaactttttctttcccagagatttccacttattatagtacaagtgacctttaaagttcctcttatgaaagatctcatgaatacttcatcaaccaatcagctacaattgcaacagaggtataactttcttacttacaggcgtaattgaaaccttgattagcttcctcaagtagttaggtgactcagtaacagacactgagcaaatatactgatagcatagctagatggtgcttagagtcttgcactttaacctatgtaaatatggtatgaatcacagatgcgccatgtgccacaggtaatgcagaaacaaaatagaacctttctcttctctttgattcttatgttccttgctttctacagacaatgttggtctttgttcaactcctttctggactatactttcttctcccacattgttttaccttccaatcaaactctgctatatttgattgtctggtagaaaatccatttattactattcagtgtccttccaatagtttacaaagccttatttgtatattactccatccaaagtccctgaccttgtctccccactgcctattatcctccagtctcattagtctcctttgcttagcttgaaattttacatcagtattccctctaggctctcacacacctccatccagtctctcttttaatgttccctctctcactacttcttcctcaagaatattatacaatagaacctcctaaactctgtctcccttttccctaatgtaaaattcagaacataaaggtcaaaacctagttaaactttccatactcttctgtttcttagaattagcagctggagctagttgatttacataataacagtttacagcctgggagttctcaaaacattaaattaccaagaacatctccacacatagttcccaatacacctcatatttctttattgtaaaaaatcatagcagccttggaaaaaacactacaataatttggaaaggtggctctcttctaatcatcataggctttgtgtcattgacatctatctataccagttttcttagaaatgttaatgctgagcatttctgaggcttggtatttgtgacttgtcatagcgatgtagttcatttttctgcccagaaaactcctttggacagagattagcacatactcagagcctccaaggttaagaaaacagatgcatgatactttcaaaagtgaggccttttctttcaaggagagattttcagggtcctcaagcattaataccatacagctttctcagtaatcttttcttttaagacaaaatgttttctgatttgggtagatggcatatatagaaaattctgtgaatctggggagggtctaggccctgctccaaatgatatgtcagactctgaagaatccacatggatgccctcaccctcactggggagcagaaatggggtaggacagtgggttggtggggggaggggaggaggggagggacagggaactgggattgacatgtaaaagaagcttctttctaatttaaaatttaaaaaaggaaaaaaaaattgttccgtgaatgtgatttgtataaatgacaggggacagattcctggaagaaactaatttgctacaggtgagaaaggctgctgaagtgaattcaagtaagtgctcaccgaagaagccctcttttattctgcacaaccagctcactgctcatactccttaggaaacaaataaaaaattaatgtgtctttcacttgcagtacatatctggaggtttgacagacaaacagatctttgcacaccagcatggttgtgaagagaatctcaaaggtaaattattaaaaacaagaaaaaagaaaaaagactgttatgtgcaaatctccttggatattaaacttgcagttggttacaaagcggtcatgcgccaataatgacggctggctgtgatccccaaggccttcttttaaaatttgccttacaactgcaaaaacatgtgatctgaagttggaggaaaaactgtctctcccgtcacagtccattagattgctgaactatgattagctagaagttaatctgcaatctgtagcatggaaaagcttttcaaatgctgcaggtttcagcagacattattgtagtagtaatatgagcatccatctttgcatctcagaaagaaaaacaattgagttcaacatgtctctatggaccactattttgattaaaatctatgaagcgctttgagtaactataggaaattaatctataacttttttgagctaaaggaagaaaatgaaattctgatgtgactgatacaatattttaatggaaaaacatctcagggatgtatgagtggaggaaaatatagcagtgttaagttacagttctgaggcctgtgtttactgccttaatactctctctaagaagctaggagtggcagcacaaactataaggttttgttggtttgcttttcagtgctgagggttcaatgcatggtctgatgcaagttaggaaccaccaagcaacatccctggcttctcaataaggttctactggagccagctgaggtgtagtgagaggtgtggggagacttggatgagtatatcaagttaccttgtgaagtagaatttatagacttgcccaataggaatggtcctcaggaaatgtgagcctgagtcctctaactatggatagaatcccatgatctcccccaggaacctattctaactgtatcacttgtaaaaaggaaatacttcctacgtcttagaaaaagctgtcagtttttaagcctgtttcttgtttattgacctctgtgtaaaaagaaacccaatcaaaatcttcttttaaaatgttttcttagagatgtacattgtctttaggactcactggtgcgcccaagttccacaataatgaagctaaccctcaagagcaatacaggattttcacttcagttcatattgtaagggatggggagggatggatcttagcggcctttgggaaaatctgtggtcttgatccctgtcctccccactgctccaggctcaatcatcctgcctcagcctattgaatacagggattacacagttcagtgtgagtttctagaataaaaacatcctcagatatatctttttccataaattaaataacacttggatatccctctgtgtcgcttctgtctgttagacattatttttcgctctatgcttctccattatgatatgacttcccttaaaataaggaaacaaggattggaacaatactctaaagaggtatgccattctatttatacgagtttttaatgctcaaattattctaaaacacagcatctattttgtaacattttcaagttcaactgtaaagttaaatcggttccaatatatctgttgttgccatcaaacctctgttcaaacagtctccttgggaagtcataaacttattttggtgagggcattaatctgtatttgaaattcctctttccaaactgaactccgaatctattgaaatcagttgtattatcttagattcacaatattttttaagcagaaatttggtcacccagttctatcatctattctactttaaaacttagtctagtatcatttttggctatttcctgaaatgacagcaacctaaatttccaagattaagtgtacctggtaagttctaaaatatatgctatagaacacttagaggattctaaaagaggagttccctaaaattagatgacaaagtcattgtcttttaataaagataataagaaaggtagggtttctttgactatacacatttctggtgtgttcttttaaaaagtcatatttcacacactgcctgatgtgtggtaagtactgtttcactaaaacttaagaatccttattttgtggtgtatttgtacctggccttgtctctttactatttgcctgatgttcttaatttatattttaactcctatctagcaatatacatatctaattttttttttacttctaccccatcttatttggaatgaaatgcttgaaatctctctgaatatagagccatttagctcttctttgggtgatgggagagacaggaaaagacagaagaggcaaggaagacaatacaaaaatactctggttactatctagaaattttttgtcttcagcgatattcaggaagtcactcacttattcattaattctcaaccaggtgtatcacgggttctagtccctggataatcacatgaggcatggtctctcatggtactgtgctgtgattgaaagaagccctagaatgttaattttctgtggctctatcttcagatgcatgtcaggtactatcttaatggtagatggactagtatcctggagtttactatctacttctttttaatcatattgataatgaatgtcactcaggaaggaatacaaatcttagggaataaggagaaatttctttctcctggactacagggaactgattctttcatagaaataaattaaaatggttgagctcaattttcttttcacaaagctatcttgattaccagtctcaactctgtgcttttctaagtacaaagtgattgtttgctgatttgttgtgctatcttctgaactattgacagcaaggtgtccttcaagtaattatggggttgtgtctttccctttattgatgctgtctgaacaatcagtgtaattctctctctctctctctctctctctctctctctctctctctcacacacacacacacacacacacacacacacacacacagagagagacacaccacatcataccataccagataatggaaacgaagcaacacaaattgtaaaaatgaagccctagtaaaacatgggaatgtatgatgacatggcacctatgggtcacagtggtctataaatttagccaataccagttagacagttggtaaggaaaatgaaatttctattaattagaaggtaatgggagtccttatacatgttatcttttcttaagggcagcttcacaaatgaccactgaaaagtgcactcttttcttatatataaaatgctatttattacatgtgtttcacatttcacattaattgaaatgcctgtccatatatttcttttatgaaagtttacttcagccttgcttaatttgcagcctctgagagggtaggctcactgtcagttcacttcaggtgtggtattctttttggacaggcattctgtatttacatatttaggtatttttgagtcatggtctttaaaactctagctcaggttgggctcatttatgtagtgtatgcttaaactcacaggaacctccctgcttcggcctttaaagtgctagaattataggtataagccgccacacctgactcagataagcagtcttaacagtaagctaagtaggtagaacacttaatattgatgaggcatgaataactatttcttttatagataatttatttaactttattttatatgcgttcatgtgaaggtgtccaatccccctgaaactggagctacagacagttgtgagctgtcgtcaggattctgggaattgaacccaggtcttcttgaaggtcagccagtactcttaacacctggggcatttctcttgcctggataactatttcttaattaatgaaaactaagcagtttctttagtctaaatgttatctgaacacataatggacaaacattattcttgagttttctttattgggagtttgacccctcttaaagagcttaaatcatgagctgaagaacgtgcagaggcacatttacatacagagtctcactgtttaagaagtatacacaaatttgaaaagaaatttggagaagatttaagaaaacatgccaaagtttggaaatgacaaaccacaaacaaaagatgggtagttaatctcaaggacaactggagtaaggaagagaactatatccacagacatgaaatggctacttacttaaagaggaagttcactgatgagcttccagaagtcagaatactaggctgtgcagttatgttttaagaagagacttaaaagagaacactactgtacagatggtaaagcaatggaaccaagtcaagaaagtgttttctactgaaaatgattaggaagattagctagttagctgcaaaaaggtacagaaaacatgctaaggttcaagtcataagaacccttaaataatcccttcatttacattctaggatattttgtttccataattaattatgccgagtcattacttaataaaattggaaaaataaaatgaacatacaatttattgtctcttattgacatcttggcacttgggtatgtgatagctgagagtgtagatctcataaaaatatctgcaaacaatacattgtggatcatttcaaaaatgattctgaatgaggtacaggtcagaaccagagacattttgcttcgaaatcatctctccctaactagaagtaataagggtactgtcatatactagtgattgcattctgggaagcaagccattccatctgtatatgcaaaccctaactccattccacaatataaaacacatctcacttgtgattatatctttgatcatgacctagatttggctgaatagtacagcttacttagtgatgggaatatcctttgcttactatgctaatgttctaatgccctctcctttaccttcctcctcccgaggtaatatgccattatttatagaggaattttctggcctcaccatgaatcttctgtttaagttgccttatttattggtagagagggatttttgccattaggcttgacatgttggacaaataacttgcatgaggatttagggagtttacagacacactgggttttatatcctgtacaaaattttgcaataataaatgacatattttcgacttgacttctttcaatgtgaacttctgaacaaaatatcatggataattatttcacttctaaagtgaaatagagagatatggggatttttttgttccgtttaaagtgtcttagaagacggcaagagttacagaactggaaaaacagggaattcaaatgataaagaaggcagggtttaggacaaagtgtggtgcttctctcctctaatcccagcttttggaaaactgaggaaggaggatccccaagagtttgaagtccatctaggatacatatagagtgggttccaggccagcctgggctatagagggagactctgtcacaaaacaaaagaaagcacacataaaaggcaggtgtaaatcctatcaataattatgtgtgggctgtgagcacagctgtattcacaaagcaagaggaacatacaaaacatggaacaattcattctccctgctgttgcatagcaagcaagacacagcagagaaaatagccattaaatagagtcttgaaggactatgattttatccaggtggaagacaggttgagagtatgttaatgtgttgtttagtttttgtcacctggtgtcttagttggggttttattgttgtgaagagaccatgggaactcttataagaaaacatttaattggggctggcttatagttcagaggtttagtctgtcattgtcatggtgggaagcgtgacagcatgcagccagacatggtgatggagaggaagcagagaattctacatctggatccacaggcagaaggaaaacagacaagggcacactagctagacttgagcttctgagactttaaagctcatcccccagtgacacactccaccaacaaaaccacacccacatcaacaaggtcacacttcctaatggtgccactccctatgggctacagagggtcatttttattcaaacaaccacacctgggaaagagaaaaaacgactgaaaaaaaacaaactacctccatcaaattggcctgagtgcatgtctgtggaacattttctgaaataatgattgatgtgggagccccagcccagtgtgggtcgtacaggtggtcttgggttgaataagaaaactagatgagcaagctatagaatacaaagcaggaaacagcattccaccatggtctctacttcagttctggcctccaggtttctggcagttccttccttgggttcccttgtagactaaaacctataagcaaataaacccttttctcccctcagttggttttggtcatggtgtctatcacagaaatagcaaactagggcagaaggcattccatgcccagaacactggttggataacttagatttccaaaggctttccaatgttaatttaggctttatgcatgggcagtaactgaaagtttttaaaaacacaagtatcctaaaggtatctacagtttagcaaagctatcttaacgcagcatgaaggcagtttggagagtataacagtaaactcagggtaagttaaaaaacattgcagtaatccatgggaaggatgatgaatatttaaagtattttaaaatgaggataaagataggatggatttgagaaatattttaaggcataaacaatgtgcattaaagacagagcagatgtcagttagtagtgaggaaaatcagaaaccaggttgtgtcattcaccaaagagaatacagggattagttaagaagaaatgtaaaagttacaactagaatatactgagtttgtgtagttgtagtgattctagcttgagactatcaagcagacaataaagttgagtctggagttgaagattaatgttgtaacacagaaaagcacagaaatcagaagaacatgtactacccagagacattatgcaatgtctcagtcacactgttattattatacccatagtgaagcttctatttaagattgaaggaaggagactatagtctcccttccacacataataatattatcaacttatcaaatcccatccctatagtgtctttaataagctctctccaactccaggggacatatttctactgaaaatcaagactaagaagaattgtcttcattgtggaaactgattgttctggtggtcttgatacttatccttagcataggaatggactttgggagcccatcccacatagagggatactccctcagcctagacacatggaggagggtctaggctctatcccaaaggatatgacagactctgaagaccccctatgaaaggcctcaccctccctggggagcagaaagggtatgggataggtagggtgttaattgggggggggggcagggaggcaggggagggagagggaagtgggattgacatgtaaaacaagcttgtttctaattcaaataaaaaaatggagaaaaacatagggaacaaatggaataagagccatttatttgtgtacctgttacactaaaggcaccaagtactttttgtctctatggaagaatatgtggtatgcatattataggctgggcaagaatgtagtctcatatggtaatcctgaggacacctctataggcatgctgcttaacatgcaagatgaatgcagtttctgcttaaggggcactatacaaagaagtaaatgtcacctgaaacaaatgggaactcaccagctaatctggctctctctctgcaaaaaagagggactgtacttaaaaggtaaaactcaagagactgtctgatttctacgaattctctatgaggatttctcatcgtatccttacttttaggcttccaacatcttttttcagggctagtaattgaacctagaggtgtctacatcctagcaagcactctaggatctctctctccaagccttacacatttaaaggaaattggagggataggtggtgtttttagctgctttgtgtgtcatgcagcctttgtcttagctacacatccctgccactggagtggagaagcagacatggacaaaatataaggaaatgagcccggctctgcaccaatgtaagtttacaaaaacacaggggaggctacatttgccccaaggatcttcatttttttcttcccaattaaaaggaaaaacgttttcacaggggctggagagatgactcacaggttaagagcactggcttctcttccagaggtcctgagttcaattcccagcaaccacatgttgactcacagtcatccataatgagatctggtactctgtcccacatggaggcagaatgttgtatacaaataaataaacaaaatctttaaaaaaagttttcacattatgtaacaccctcttataaaatattagtgcctggaataatcattttgcaaatgctagtcaaacataccatagtgacaaaacaggtaaaatttttggaaaaccttggtttatagatatcaataagtaactgagtcaaccgtgttccttccatattacttgtgatttaagaaagcaaaactacgttcttcagccaatttttatcatgttttctctcctttgggtttccaaatcacgctgaaaaactatgaaaaagagcaaacaccaaaacaaaagaaaccagccattttcaaatataaaaatacttgagcataatatgtatatccacaaaacgttatagtaataactataaataagttttacctatttagtaaagctgttgctgaaagggctacttaaaacttattttgctcaatgttcaaatgatattcattttttgaatgtattttattcttaaatctcagtatcaaaaacattcaaatttataagtcttgtaatttaaactaaagagcgagtacctctggaaatagtttctggtagatgtcacctaataaatggggatgggttaggccactaaaagtaattgacattcaatttaaagtttaaagattgttgagagcatcaatttttatattctatcttgaatagcatattgctgacctctgcaattatgtttatagttacacccacattttagataatattgtagtgtttgtacatctctaatttatttgatgtgtcagcaatagaggggaaacaaacatataccaattccaattgtactcactctagtttgggtcatttgtgtactacttgtggaatttgaaaactaaaacacaataatgccatgaaattgagttgttcatcagatggaacaaggatcaagaaggttcctcaaagaacagacttggagcagcttccatttcaaatgcatagatttcacacactggctggcccttttccaccttctgaggaatgtcattcattccttggctttcccctaacagactcataaagaataccaggcaagtctgaatgccataaaagagttcttgtaggaagcaaatcaaagagatacatcaacataaatgatacttgtttaatcattaagattataatatggttcaaacatttaaaacaaaaaagtttaagagactttattccatgctattgaaatttggatcaagaagaaaacgtgaggaaaaataaaggaactatatatattcacagatgtattcaggatgcttggtctcattttaaatcacagcattagttttgttttggaatatttttgtgattaccagtttttatattataagtagttctcgtttataaacagacactgtagttttgtaagtaacagttttaaatcaaaaggcacagcaggtactgataacatagttctaagtaaatgctagtctgaataggcccaggtagccagccaccaattattgatttaaggatccttgtcttgaggaagtatgatgggtgtattgtgtagaaaacaaaagcaggatttcactggtccctttgccggtggcttacaatgcctgtgattgtcagcatgctgccaagaccaggtgttggtaaaaagacaccatcaaatgagccagttaacattttttgttgcaactgaagacatcacccatggcaatatccaataaattctgatggacatttccacactgacacagtctattttcacaaggtaaaaacttttaggatttacattttcatgatacattctacttcaagataaacaaactcacactttagatacatatatgtatgcctgaaaggatatatgccagggtattaatagtgatattttggaatgaatcaccaagttttttaaaaaaattttgtatgttataaagtttttaatttgcatgcatggctgataataaaaacattaaaactatctgaaccaggatattttgaataatatagaaaatattagtaacctaaaacaatgtttccaaaatgctttaatttatctagaacagattttgttgtgaatttgggttttttgaatgataataaaaacaaaaatccttaacagataacactgaagcagggctttttttccaactcatactgatatttctttgttgagggaggccaatctgcttattattggcatttgtcacatggtaggcttttatctccctgataccatcagtgcctattccttagttgtgagaaccaaaaaagtttccagatcttgacaaatgtcccttggaaaacaaaatcacccttggttgaaatccactggcccaaattaatactatacaaaatagtctctaagggttacttctgctagataatctgcctcaattgccctattgttcagtacagctgtcagtccttaagaattaaatgaagcttagttactgctcatctaagcatatggtggataacctctagatcatcataattagctgataactaactacttctctggtaatcaaattgttgtttttccactttgaactcagcatggagctctaggaaataatataaattaccactaaacttaaaacatcaaaacgaggttgaggagaataaaagaaagagaacttctttggtcataaaggagcaaaaactgaatgcacccactttgcatatgcctccctcttgggaccttccttaaatcccacagaatgacagcatgtcctcctctgttcttccatgcttcccctatgtatgtattctcattcacaatttgcttccactggggtggagttttgaagggtaaacactttcaacttctttggtttggcaatttaggatcatttattcttttattaattcattcaatcattcttacatatccgtagttattagcactgtgattaatccatacaagggaaaatacagcactatggagctagggagatggaagagtattggggaggcctgcttggaggaagtgatttgaacaatttgatcagcaactggaggaggtaggaggcagggggaaaggaaaagcaggagatcaaaattgctcactgggcatgattctaagcagtactgctttgaactggcttatacagtggctagggaggcttttctgattaaagattgattagtgcataaacaaacaaagatgaagcagaatgaaaaaactgagaaagctgagaggtagcacagcttgcattgagctcaaggattttctggttcaggttacaagatgcatactttgacagatctccaagagaccttaaggtacctttggccaagctcaggacccctaagaaggtcaacttatattctgtattgcatatcttaattctcctacttcttggacataacccaaagataacctatttataatagaacacttctttgataatatctatatgacatgttgccaaaactaaagatactgcattttgtatagtgcttctaattcttactagactttaataggaaaagagagcattaaagtctttttgctaatattttcagagttaagtattatatgttcttcagtttttaaagggtaaaatttagcttgtcacgcaattctgacagtttttaaaaacatttatgatacctttaagttttatatttaatgaaaactatacatatatgtannnnnnnnnntttttctatacaaggaacaatcctgtcagaaaaaagaggacatccatttctagcccaaagtaaatagtcaaacagaatatcacagctgatagctgacatctttttgtaaaggagaagtcaatgatagctatatataatacactcaagtctttctgacacagctggggaataaggaattctagtcaaatattctattcaataaggttaccatatattttacatggatctccggttttcaaagagttgcaatagatcaaaaaacaccgaaggctatgtagctagggtggtcccagctgagctcaaaagggaattatctgggtgtatgtgattaactagagggagttggtaggcccttagggctctatttgcatgacaggatttatgctggcattttatttattcctgatttctgggacaaggaagatctaagcttcgatgactgaacaaaagagaggaaggagggcagtgaaggggtttatggtattagaaagtatttcaggtagctaggactgaaaacacttttgaaaacatctaaggaggaggggatcgggagagaagggaaaggaactgtttttatgaagtgttctatgaatcatgactacttatgcactaaaggatttgtggcaaaaaaaattggcacagaaggatattatacccttggacctgtggtccatatttctgtggaaggcaactccaaacagctttatcaggaaaaaaatcttgtccagctgggaactagagaaatatatgataaactgggagaggcagtgacttttgttttgttcagtctcctagctggcttgtgggcaaatgtcaaagggtaaccataacatgttgtcagcatgtatgcatgtgtgtggctactccagatgcgcccactggaatataggctataggagtttgagttcagtttgaacgtgggggggggaagagattattaggaatgtttggattattgttactaaggcaacctgcttctgaattcctaagcgatgagacttggagacctttagcttacaaggaaaactaaattattcaagacgcacatgaggatcttgcagtttttcaaggtcatcttcacaatatcaattagcagtttattggcaaagaaaagagaaataaacttatgaggcatctactagaggcttgggagtgataagattctagacaatggttttattactgattaagacttagttaaaaatgtatttcatttcttactaagtccatcatttttccctttcttttttaaggggtactgtactaaccatccctttaaatgccaagaacttgggagatgagggttttaaaatgtgtcacagtaacttagtcctcttagattagaaattattgacaatatttttatgtaaaaattctcccttgcctctttaaatttaaattgcctttaataaaaggaggaaaatttttctgaatattatcaatttagtctcgagtctaactaattgaagatgctcattttcattttccagttccagtttagactcagggacaatcaaggcattgtcaaggagatgatggcctaagacaggtgaggacttcttaaaattaagtgtgtctatggcctgagaaatgcctcagtgtttcagtggattggctgcttttctagaggacttaggttgacctcctataaacttcatggttgctcacaaccatctgtaactctagatctaggcttctgaggacaccaggtattcaagttatgaatagacatgcattcaggcagaacactcataaaatatgaggttttaaaataattagagattagagttacacatcaaaattttaagtatatccataaatgaacatggttatacagagattccaaacaagaagttcagatttttttttcatgttggttggattttcttctagaattaatgcagtttcctataacatttcatatacttcgagcagccgcttttctgtgttttgttctgtttttgtaaaattaaaggggaaacttggcattgtggtgtatgcatgtaatcatagcactaacgagatggaggcaggaagaccaattaatttgaggctagcctgagcacataaaaccatgtttcaaaacaaagctaagagtttaaaggaatcatttttttaacacagatggaagtttatttctgagaaccacacatatttggccttagttgttataattccctgtagcagcaactaactagtttaacaattacatgatactctgtcagactttctttagtattgatcctagattacaaaagtttctctctgctctgtcacagtctagtatttcttaggaacccattgtttttttctgcttctaccttccagatttgatgtttcctaatgtagaaggaatacagtcagtattacagttaagctggcacatggtagaggtctcaaactaacatagtgtccacatttagaaaaaattgggaaaaaattagattgagtcaaaaactatttcagaagtagcattattattatacaataacacagaacttcatgatagcctgttacaattcagcctcctaacacttcaccattttattgcttatttaagagctgttaccaggattatttatcaaataaattcttacatgtatttgttttgctgggggaaaatctcctgggataattaatagttatgaaaacatctttttagttcagtcaatacatttaacaactttgcaaagctttattcctatatttctaatatatgaagtatagaatgaggaccattctatacggaacaaatatttattcagttcctgggtaacatattatttattaaaaacactcacacacacagacagaagcagcaggaaactgacagatttaaaagagaaaagaagtcttttctataatttatttggagctatgaaagttattgaggtaaaatactagcctcaaacactttcccaacagctgaaattaatttttatattgtatggtggtgaaacatataaggctcactggttttgaatattctattcaaaatatctcaaaagaaaaaagggtatttgtgtagtcaactatttgaactagtagagtgattgaagcataaaggagataaacaaaaaaacaatgtttagaaagtatataaatatggaattgaggttctcccataaaacattcaatttgaatttaagagttattaattaatgttgcctatatgccattttaaaaactgatgaaatctcaggtaaaagaactaaaaaggcagtatacattatgaaatttgagatgtttttaattatatatattatatatatcagatacatatatatttacattttgattaccttcaatatactcactagctgaatgatagacaatatgaatgatattaataacaaagagcaccactccctagatattacctaatatctttttccatcatttgaaaaaggacttcatccgtaatgtcagcttcttttctttctttctgtatttcttatcactcagaagatagctctctctgaggaacctttttttggtatgtgcattttgtttatgctacacatgccaaatagatctcccaagatgaaactctgagctcatttggaagtcatttttggtagcacatgaatcagaactcttattttcttctcagcactactggtattttattgcttccatctatagtccaatatgcttttagcgctaagaaccctgaggccaaacacacaaagcactaagaaaatgggaacttctagcgattccaatttttgtctctctttcagggttcttctctcccctgagagagtgaaatcactttaagctcaccatgaaacaggtacatggtgagcatcagtgattgcctgatgctggagatgttgatttaggagtctttgacttataggtcaggtgtaaaacccttaaacatgcttgtcaaagtctgctggtcaaattcctatggatttttccagactctgctcaaatgtcaaggtccttatgaaggcttttctggccaccacaggcagaattaggcaattcctactttgtattattactatatcctagcatatttctatatgtcaggacacagtaaattctaatgcatgtactggctgtactcacggaatggagacaaactatttcttccctttatttctggcccagaacatcaaatcatgttgattctcaataaataattgaaagaatggtcagagaatgaataataatacccttcatctgcacattatagattacaggaaatcaatgctcagagaggttatatgagcaaacccaagttcaagactgtcaataagttgcacaccaagtttgcatgtcagttaagttatgcacagtaagcgattaacaataatgatgaaagaaataaattatagcagtatcttaagataaacgttatttaaaacctttgagttgtttacctcttgaatcttttatttaattattgagatctataattgatctgaactacagaaagtaaaactactgataggagtgttgttcatgtgttataacttttatattttgaaaattgattacttcttatgagctatcatattgttagcagatcagattactaattataggtgagctgaaaagttaaatacgtgtcttcattaagggtcaaaggccaacctcagcttttattctcagcaaagacttgaaaagtaattatggtatttaacaaagtttggtgtactttgtactattatcagagttgttgattcaactgctgagatataccctgatttgtatcttaagaactaggaagtggttcctccaagcctattcttatctaacattgtctaaaccatttaatgggacaatatcactgactaacagagtcccacttaacaaataactgtttgagtgaaaagagcacacctcaaatgacaaatagtgtggctgttaactgactttccttcaggagaataaaaatctataacctgaaatcagtacagttattagatatataaagatatcaatacaagttcaaaaaataaacaacatgactcaccatgttttaaaatatactactcaccaaaaatagggttctgaagttgttgagatcaccaaaaaagtcttctatggctactgtgtttgggtcaaaaatgaagtattctcccaggttctcatagagcttcaccatattgttgtgcatggtcgacagtttttcatattgctctctggcattctttgtaaagctgtaatttgcgttaaggaatgtggtccaatgatatttcagaggtagccactagatgacaaatcttaataaaaccatttcttctgtaaatatatttatatatttgtttactagaactgccattataaagtactttcaacaacacggtttattttttttttcacacatccagaggctagaattctgagtgaaaagtattgggatatttagtttcttatgcagtctctctctcttgggcttgaagattgctgccttcttattgtgtcctcatataattgttcacctgtttggttgtgtgttttcaaatccccatttcttaaaaagtcacctgtcatgtagcattaagatataccttacaattttttaaatgtttattaccctttcaaggctctttctacaaatataccttttctgaggaactttcagttctgaggaacttagttgtctagccttcaatacatgacatatggggtgtgcaagacatgtcatacaattcagtacaagagtttctatagttatattgcttaccaagtttgaaaatctttcaattggacagaaatatttaatgtataacatgtatacatgtttgttagaatatgtttgctaaatatacatcagaaaactacctccatttctacatgtgggaatttatacatttatacacatgcagaaatacatacaaaatatacatagcccatatgaaaagggaaggaacagaaggaagaaaggtctctctgacattcctttcacgttcttcctctaaagcagtccaaaagagaattttttgaattaccatgtgaacaagtcctaagactgtcaattcagagatgcccactgaatacctgtaggaaaaggatgccgttgcctctgaagaacatcatagagaaacacctgagtgtgtcttgttgaattgctcccattttacataccattttttctcattgatgattctccatgacagtgtatccttcttcaaatgttatgcttaaaatatacactgatccctcattggcattttcattttgtcatctctcatgtcatataaaatgtaaatagccatgtgatggctcatgcttgtaatcacacattcaagtttaacctgtgctatacagcaagaccttgtctaaaattaaaactatatataattatctatctatctacctacctatctctatcaaacactgttttagaactattgaaaatgaaccttttataactaataaatataaaaccatgaatgtgctgacaaaatttcgaggtctggtgtaagtttgatgaatatttaagaatatttgtttcttgtctttcctctttggctacataattgttgaatgctaattcataagagtgattgagagaacagtaagggaataattatgaagaaaagaggaagccaaataaatatttaaaaactagagttaggttaaaaattaaagttaaaaatggttggtgatcacagaagtaaaattgtaacatgggtgcaaatgtattttggttggcataccactcttgttttactattggaaacaatgcagaaatcaggccatttccctaaaattactttgtaactgacacttacagtatataccatgatttcagaaatgatgtatcatttatccatggtctttttgatattacttaactattaacattcactctcttctaacaagtgtaattaaatcattcaaccctcaaacctattttgacattaatagacctgaaagaatgaatacttttgtaactgcctttttcataaaatgcacatgcttcctatacatttttattttattaatgaagagtatcaccatataatttttgattttaacactgtgtacagatattaaacatcctgtttcagtggagcagaatttagacactagtctttatttctaagcacagaattaaagtgattgttttatttccttaaacacccctcaacacacacaaagggaaaaaaagaaaaaaaataagactcatgccagaaacttactgggcagaaacaaattgcaaaggtcacttatgtgcaattatttgcaatgcagattactaaaatatatatttcaggatgctcaacctctgtaaaccagtggagaagtgaaagctaacaagaaagacaaaggtcttatccaactcatttatcctggtatacttttttggaggctaaaatatgtgagtgtagtgatatacaattttaccaatttgtttttacaggcctaaaaatgatttcaaaaatactgtgttccaaagtgagaagttacagaattctatgaatagtttctttgcagtaacaaatggaaagcagcatggctttacttatctttacagttattattctctaaaagagatagatgtttcagccctgaaatatttcacaatcacaatcatgccaccaaatcgtacatgggattccacattaaaacaaaaagaactgagcatgctggtcatggtgttacccactttgagaaaaagctggtagacctctgtgagtttgaggctagcatgttctaccaagccagctgtggctctacagtgagtatctgtctcaaaaacaaatatgaataaaaaacaaacaaacaaaaaagaaaaccaaaactaaacctaaaagacataaagagaaagattttaactatatagctctttgtatacaatgttactttttcatgcctttattttaattataaaacttaatttttgaattgccactaatgcaagatcttatttagcacttgttattgatgaaataataatcaaagccttagtctctatcctgaataagttaatatcctaatattacaaataataattgcatcctcaattgacgtttgtatatgactaaaaatataaaacacacttttctttgtattatgttccatatttttttcaaatcaactttttctctaaagcaatgaaattgcactgttatagttttaatttgtgggcattaaatagaagtcactcatccatacaatgtttgcacacttgccactaaataaatgaaatggaataagaaacaatatatttttcgtgtatgtaatgggtgactcacacaactgtagctactagggaggctgaggcaggaggaatttctacttatgtgtaagatgaagtaagtatctccttaactggaatatgtctatagagaaggtcagaagtatgttttattagcagagacttaaactgttcctattccatgtgactatttaagattgaggataaccgatttcaggacatatgctgtagaatactgtgaatgacttactaggtcgaaaattttgctctaagctgggttttgagaacactcaaaagaagcagatggccaggttcagaatgcaggaagatgcagagggaagttttatggtgggcacagcgtggaactatagtcaacttctaccatagttctctcaggttccacttaagacatttgtaagaatgacaacatcatggggcatttactcctgaatgtccagatacattggcttagatgccacagaacagtgaccaaagctctaacaatattaaagagtagggttctatgaggtctagtttctgctgggttcaaaagattcaatgcatacttccatctattcaaaaaccctgaactattcagggaactctgggaaagccatgaactttctatgaagagggtaattcaaggtaatttacatgccacattaaatatacttgtgtggtggtgaggtagcacagatccatcatataaagtaatcaaatataagagagcaaaaaagtcatttcaaactcctttcctttcactagactgctttcaaattctttgtacaataaagaaaactcttcagaacttttaaacatggaacttaattaagaaactcagaactagacaggtggtggtttgcatgcctttaaccccaacacaaaagaggcagaggcaagtggatctcttgagttggaggccttggagttggaggtggatctacttgttctgtagaccaagctggtcttaaactcacagagattcgcctgcctttgtctgctaagtgctgggactaaaggtgtgcaccaccactatctggctatcaaaagctttgatcatttatatttttgtggctatgtataaatttctaaagctcacatgcctattgagttaaaaaacagtatggacttaaaattcaacttgagaaatccaaatttcctccatagtgctcacatagaaagaaaattattttctttttacttcaatgtacattttatagctatttgggctcttaaaagcagttacatctacctgccaatgcctggatgctctccaactggaaacagaactatttcagatgaggtagagaaaactgtttctcattttacttaactttgatggacagagtaattattagtaaagaaaaagtgttttattgtaagtggaatgagcattagcagagcacagggggtgaaggagtctatatatcatgtggctaattgagtcaaatcagttcttaaaactttcatctttgtaggcagcacattagttactaacaattttaataaaagcttgaaatattaaatatcattgctggtggattgttggagaacatagaaaaatcaatttgagatccacttaaccttcacacaaattttggtagcaacatggtataattgcccatttaaataaaaggatgtcataaatgcagactctattgaaaaatagtgtttgtaatttttataacatcagaaaaattcccataaagtctaaaaataaatatgaactttccatataacttgaataatttctactgagaaattagtatttcaaataattaactgtaaaatattattgtcgcaactagttgaaaatcacataaaaactatatattgtctggtgaatgcatcttgacaaatattttaaaatatgaaacattaataagaatagtatgtacagcattgcgtattactataatactccatgatagctctagatatggaataaattttcttttaaaactcttattacaaaatggaggcagagaacatttgagtaatagaagatttcctattaaggatattgagctcaaattccaagttttgaaaatatagaatgcatttatagtgccagagggatatattttgtaataaccagacttttccacagatagactgaacaatctagattttaaaatgttttaaaatcagcttctacacaaacagaagtccaccctgtagttttccttttgtctattctttatccaatccattttgcgcatttattaagtgcctactatgcaccaaatatcttttagagaatgaaagcacagctatcaattttaaaggtcattgcttttctagaaataagtttactcgggattccgggcccccacagagtgcagagtccagaggtgagctgatctggcccctaacttggacccaacttacgcctgcccgccctggcaaatcccgccctgggaactgcaggcagacagaatcggtccctgaggaccttgggatcctgtctccgctgagatcgctaggccattctggtcccccagagagtgcagaggtgagctgattctgcccctaacttgggcccaacttccatctgcccaccctggcaaatcctccccaggaatcttcgacaggatgactcgaaccctgaggaccaagtaactcagagtctgctgacatctctgagccagtgctgatctcacccatctggagagccagtgcctcagacctgcctgcacccaacttgaaacgcattagagtatcaaagtcaattgcacacacctgaagagaacaccagaaccatacacaccaggaaaagaagtgataccagctgtacccactggaacaagagatgggaagacaacaatataagaacacatccaacaacaggaaaaccaatatgataccaccagagtctagggactatacaccagcaagacatgaacatcccaacacagaagaagcagaagagagcaactttaaaaacaacttcatggaaatgatagagaatctaagagaggaaatcagaaaatccttcagagaaatggaagaaaagacaaaccaaaagatgcaagaaatcaaggaaagccaaaaaagccaagaaaatacaattaaacagctgannnnnnnnnnnnnnnnnnnnnnnnnnnnnnnnnnnnnnnnnnnnnnnnnnnnnnnnnnnnnnnnnnnnnnnnnnnnnnnnnnnnnnnnnnnnnnnnnnnnnnnnnnnnnnnnnnnnnnnnnnnnnnnnnnnnnnnnnnnnnnnnnnnnnnnnnnnnnnnnnnnnnnnnnnnnnnnnnnnnnnnnnnnnnnnnnnnnnnnnnnnnnnnnnnnnnnnnnnnnnnnnnnnnnnnnnnnnnnnnnnnnnnnnnnnnnnnnnnnnnnnnnnnnnnnnnnnnnnnnnnnnnnnnnnnnnnnnnnnnnnnnnnnnnnnnnnnnnnnnnnnnnnnnnnnnnnnnnnnnnnnnnnnnnnnnnnnnnnnnnnnnnnnnnnnnnnnnnnnnnnnnnnnnnnnnnnnnnnnnnnnnnnnnnnnnnnnnnnnnnnnnnnnnggtagctatccttgtatctaacaagataaacttcaaactaaaatcaatcaaaagagatgaagaaggtcatttcatattcatcacaggaaaaatctatcaggaagaagtctcaattctaaacatctatgccccaaatacaaaggcaccaacattcataaaagaaacattattaaaactcaaatcacaaataaggtctcacacaattatagtgggagacttcaacactccactcttacccctggacaggaccaccagacagaaacttaacaaagagacaaaggaactaacagaagttataacccaattgggattaacacatggaaccttctcaaaaatcgaccacattcttggcaacacagcaaacctcaacaggtacatgctttaaagatagaaatcaaaaacaannnnnnnnnnnnnnnnnnnnnnnnnnnnnnnnnnnnnnnnnnnnnnnnnnnnnnnnnnnnnnnnnnnnnnnnnnnnnnnnnnnnnnnnnnnnnnnnnnnnnnnnnnnnnnnctagaattcaatgaaaatgttgacacaacatacccaaacttatgggacactttgaaagcagtactaagaggaaagttcatagctctaagtgctcacatgaagaaactagagaatagccacaccagagatctgacatcacagcttaaagctctagaaaaaatggaagcaaattcatgccggaggagcagatgacaggaaataatcaaactgaaggcagaaatcaataaagtcgaaacaaagaaaacaattcaaagaatcaatataacatagcgttggttcttttagaaaatcagcaaaatagacaaacctttatccagattaaccaaaagacagacagagatcatgcaaattaataaaatcagaagtgaaaagggggacataacaacggacactgaagaaatccagagaatcttcaggtcatactttgaaaacctgtacttcacaaaatttgaaaatttaaaggaaatggacaattttctggatagttatcacttaccaaaattgaatcaagaannnnnnnnnnnnnnnnnnnnnnnnnnnnnnnnnnnnnnnnnnnnnnnnnnnnnnnnnnnnnnnnnnnnnnnnnnnnnnnnnnnnnnnnnnnnnnnnnnnnnnnnnnnnnnnnnnnnnnnnnnnnnnnnnnnnnnnnnnnnnnnnnnnnnnnnnnnnnnnnnnnnnnnnnnnnnnnnnnnnnnnnnnnnnnnnnnnnnnnnnnnnnnnnnnnnnnnnnnnnnnnnnnnnnnnnnnnnnnnnnnnnnnnnnnnnnnnnnnnnnnnnnnnnnnnnnnnnnnnnnnnnnnnnnnnnnnnnnnnnnnnnnnnnnnnnnnnnnnnnnnnnnnnnnnnnnnnnnnnnnnnnnnnnnnnnnnnnnnnnnnnnnnnnnnnnnnnnnnnnnnnnnnnnnnnnnnnnnnnnnnnnnnnnnnnnnnnnnnnnnnnnnnnnnnnnnnnnnnnnnnnnnnnnnnnnnnnnnnnnnnnnnaaaaaccacatgatcatctcactagattcagaaaaagcctttgacaaaatctaacaccccttcatgataaaggtcttggagaaatcagggataacaggaacatacctcaacataataaaagcaatatacagcaagccaacagccaacctcaaattaaatggagagaaactcaatccaattcatctaaaatcaggacaagacaaggctgtccactctcgccatacctcttcaatattgtctttgaaatcctagctagagcaataagacaacaaaaggagatcaagggaatacaaattggaaaggaggaagtcaatctctcactatttgcagacgatatgatagtctacattagtgactttaaaaactaccagggaactcctacagctgataaacaccttcagcaaagtggcaggatacaagatcaactcaaaaaaatccgtagccctactatacaccaatgacacattggtggaaagaaatcagagaaacatcaccctttacaattgccacaaacaacataaagtaacttagggtaacactaaccaaaagagtgaaagacctgtaccataagaattttgagtctctaaagaaagaaattaaagaagatatcagaaaatggaacgatctcccatgcccttagataggtaggatcaacatagtaaaaatggcaatcttgccaaaagcactctacagattcaatgcaatccccatcaaaatcccaacccaattcttcacagaccttgaaagaacaattctcaactttatatggagaaacaaaagacccaagatagccgaaacatccctatacaataaaggaacttctggaggcatcaccatccctgacttcaagctgtattacagcgctacagtcctgaaaacagcttggtattggcacaaaaatagactggtagaccgaatagagctgaaaaccctgacattaacccacacacctgtgaacacctgatttttgacaaacaatagaattaaaacaagttaattatgcaaagcgtctgatagtgcctggcctaggatgcctcttcagtaagtattggagagcagaaagcttccctgtggagtctgcaatgaggatgcatcagcttcttccagagtcctgggcccccaggctcatgcatatctctggggcagggcaggaagggaatgaccactgtggtcatgatcctgcaaggatatccagatttctgaataatgacaaacagggaggagactctcccacccacactccctaggctgtatagcatgtccctgtgtagacacggagcatgtctgattctcagaggaagcctggctaatatttcccaggggattcttcacattcagaattcagacaaattgctgctttttaattaacagagccccgacaactctgttatctgtcttctcatgaatctattttctctttaatcccttctcatttaggatcaccctgtaagggtctgtggatgctctctccctcacgccttattctagtgcactcactcacccttacgatggtgtgagatggcacagtgtctatgtgatgacatgaagtgaggtgaatgacaggctctgtgacagtgttaagccaccatgtaaagctactttgaaaaagcaagaaagtgccacagcagtcggtcctgtctgaaacagctacctagtaacaggcatggtacatgcagctcagatagatgggacaaacagttgactcatgacccaggagtagtaaagttatatgcttgccaaaaaaataaataaaagagtgacacactggaagacaaatgtcacacaatttaaattttatgtgttannnnnnnnnnnnnnnnnnnnnnnnnnnnnnnnnnnnnnnnnnnnnnnnnnnnnnnnnnnnnnnnnnnnnnnnnnnnnnnnnnnnnnnnnnnnnnnnnnnnnnnnnnnnnnnnnngactatgtgaagtcttgaggtctactgagagcatgataaatatggttgataacaatacgctatattttaaaagttgtgagatagtatactttaagtgttctcaaaacaaaacagatgaatatatgtgatataccatgttaattggtttaatttagccatgccattgttaacatactgtattgtgtatcataattgtgcatgactttatttatgaactaaataaatgaatgaaaaaaagaaataagtttactctgaccaaaaaatcacaaattatattttaaattgcaaatcaaaacatgtggttaaaattcataagctgcccaataaatgtacatttgggtccaataaaactcaatcttgggagacacagaagtagagcacaagactagtagtgcaacaataagaatggaatttaagctgagagctgaatgtggacaaccagttgaaggagcactgagggtgagaataaatgaagagtattaaatattctagaatcacaaaaagtactaacatctacaatactaaagtccatgaagcaaatggaagagagaaaacaactaaagaagcaagtagggacaatatttcatgaggcttatagattttcttaaaaaaattaattagaaagaagattattttacatgtcaatctcaggtccctctccctcccctcctcccgtgccaccctacctatcccataccctttctgctccccagggagggtgaggccttccttaggtggtcttcaaagtctgtcatatcctttgggataggacctaggccaaccctcttgtgtctaggctcagggagtatccctccatgtgggatgggctctcaaagtccattcctatggtagcaataagtactgatccactacaaggggccccattgatttccaaggtctcctcactgacactcacattcagggattctggataattcccatgctggtttcccagctatcagtctggggaccaagaggtctcccttgttcaggtcagctgtttctgtgtgtttcaccagcctggtatggacccctgagagcaagataagacatgctataatagagggagacattataggtttaaagagaaatcaggcactagggaaatgtcgggagagctacaaagatgacaccaactaataatctaagcaacataagagaatctaccttaaatgcccttccctgataatgaaattgatgaccaattcatatgccattgtatagccttcatccagcagctggtggaagtagaagcagacacccacagctaaaccttgaactgaactgatatccagttgcagagaaggaggactgatgagtctttttgatgttttactgaggaaaatgtcattgaacagtttaaagaagtagtagtcagacaaccaaaatttacaaccgaaacttataggtttaagggaataaacatggaaaataaaacaagtgtatgttaaggttttgaagtgttccttgtaagcagtgaataatcactgttttctatacagagaggtaatgtcatactatgaatttagctagaaacacaaatgaagatggtacagaaagtatgaaactggtgcagagagagcagcacttagcaagcctacagacttgccctgcaaatagaacatcagggatggatgtttgaatataataaacacatggaaagccagacatggttgtacaaccctgtagtctcagaatcgaggaggcagaggcaaaaagattgagagttcaaggctaacctgggttatatagtgagatcttaagaatgaaaacagaaatggaggaggtatattccatgagctatgaataactacataggtgcagttagaagtaattgcaaaagaggatgtcacttgagttttgagtgtgtgagactccaagtatgtttttcataagtttaaaaacaattactttatactttttaattatgtatataggtgggtatgtaaacattagctcagaggatagaagagggcattgaatgaccctggagctggagttacaggtggttgtgagctgtctaacatggtttctgggcacttaaatcatccagtcctcaactgttaattactgaggcatctctagatacataacaggatatttttttaaaaaaaaataaaaataaaaataattaaaaaatgacaatttgaatgccaagagaggaaacactatttagagggagagattggctagttttgaacatactgagcttaagacatccatgaaatatatggatggcttctcaaagggagttgagctatgtgggtaacttggttaaacagagatttggaataagcagtagagaccactggaaagtcaaagcaagatacagaagctggaagactcatcttgtgttatcatatcttgataggaatgatgtattgttcttatgttggttcaaagaatacacttttagtccaaataagactggcttaatatactacttcatccctaataaagaaagaatattctggcaagtctagttagcagactaaaatatcaaattctgtagttaaaacttcgagtgaagggctagagagatggctcagcagttaagagcactggctgttcttccagagaactcaggttcagttcccagcaaccacatggtagcttacagctgtctgtatgtaagtcaagtaccagggatctgacaccttcacaccaatgcacataaaataaagatttaaaaaaaaactttctaaatgaattgtcactgtgaccttggtcaaacagtaggcagactgaattttcttgttttgtgtagtaacaaaattaaggagtcagggaacaaaacatttcaagaaatgctacagattcaataacaaccatgtatgtttacaaaatttgttaggaatggtgagacaaagtataggaaaatcactccttgtttttattttttcaatctctgtgtgttttaatatctatggcatttacatacttctgatacaaccttgtatgcatgtatacatatttgagttactgtgccctttaatatgattctttgaattctcaggcattgtgttttccattttccctgattgtatcagtactttccctatatttatttgccaagtgcctatttcaggttttcaaattgtaatactgaatcagaaatagtttcatcatgtacttttaattagctagtaccttcactttcaggcttgattttaccattcttgttcattttatttacttaactgcaactaccaacaaagtaaacaaatgggaaaagacaacactatccactgtaaagctttaacaactgtgacatgacagatctagatcctttccttgcccatttgtcacgagtagattgatctataggactcatttcccataatttggttgcaaatcaaagacattaccatagaaatccttcatgggtcaatctagctttaaaataccagagtgtataaatatcaaggtaaagtagaaacacaaccattttggaaaaggtgtgtatagtgaaaggtttcattcaaaagagaaacaaacagcaaccagagccatcttatacatatatacatatatataaatatatgtacacatctatgccatatatctgagtgtatgtatacaatacacacacacacacacacacacacacacacacacacacacacacacacaatgtagggtctcaaggagcccaggctgccttcaaagttgctgtagtaaaaacgtgaatttttgatgctctgactttcacttcccttttgctggaattagaggtatatactaccacatgcagttttaattagtactgtgcattacacttggggcttcctgaatgctggtcaaacactctaccaagttaactacatttccagcaggtacatgaatcttatgcaaatagaaatattagaatatattacttaacctggttgcttaattcatgtaatccttctgttctaggcacttgacggcataaacggaccttctacgtacatggcaataagaatttatcctagagcaaacttgttcaaagacagaaatgttcctgtaaaataaaataatagcactcactgaaggacagttttatattttctaacccaatttcctattgaggactctatttcgtttcaatttaggctgtttgtaacccttgccactaaacttccaactcctagttccttaagctttgaagacttctgttcatttatcagaatctattcatgctatacacttatctaaattatcccagatgatcctataataacccttttccttaactttgatatcctcctcagttaatataacttttttttgtagtggaaaggaagtgcatttcaagatataaagcgctttaatctaatacatcagtcatgacagtcaaacatttcagaatgattctctgaatttattcaatatagatgatagcttattctggtccaactcaggggctgagtttttcactagggaaattttatttctgtttctaatttacttttctgaaagtattgttttgcaacctattcctaatatacttcagtaaagctttattccttaaggcttccaaaaacacatgtgtatttatatgcatgtatatatggaagaatcaattatatttctagttattagtggattctatattttctgatatcaatttaatgtatgtctcagtatgaaatagcattagttaattctgaagatattttaagactctacacttggaagaatctatttggataccatggcattatttccaaagggcatgcttcttttcacttttcatttgttggagacataagaatgcagctgtgaaaagtttctgctaaagaaaaaaaatgtttcagtagtgtcatttgtggcatggatataaagtgagctgcagatctacctaatgtgtttgctgcccctaggtttctgatagctcaaaaaatagatggtcttaggaatcacatatgttctcttcatcaatgtgttattcaaagacagaacttggacttcaaaaaaataggaaaagacaggatattgaggtgacatctgcccacttatgttcactaaagcagtaatcccaatggatacaaaagaaccttcacctacatggagacatcaatctcattatagggacagagcatttaaggtagcctttccactattgcttagattcttggttggggtcatccttgtgggttcctggagatttctgtactgcctgatttctccttaagcccatagcaattccttctatcaaggcatctctttccttgctctcctctgttctttccccaacttgaacttcctgatccttcatgtccccctccacccttctcttctcctctcttctttctcctacttctcccctccctccattctcccaatttactcatgagattgatgactacctgaaattccatcatagagccttcagccagtagctgatggaagcagaagcagagattcacagctaagcactcctggaatccagttgcagagagggaggagggatgagcaaagggattgagaccatgctggggaaacccacagaaacagctgacccgagtacatgggagctcatggaccccagactgacagctggggaaccagcataggactgacccaggaggcctcctgtatgtgggtgtcagctggagggcctgagcaatctatggggcctctggcagtggaaccagtatttattcctagtgcacaaataggttttgggagtccattccctatggagggatactctctcagcctagatacacagggtagggcctaggtcctgctccaaatgatgtgacagactttgatgattccccatggtagacctcacgaggactggatggggggcctggatgggcatggtgggaagaagaggatgacagggggagagggaactgggattagtacgtaatttaagattgtttttaatttaaataaaattaatttaaagaaacatggagacactgtggtatacattcacaactagaataatatgccagtgtatacacttgcctcttcccgcttacttgctttgttgacatttcagctgagtaagaatgagaaatggtaacttaaatatctgaatttgaagctactagttaaactgaaagaacatgaatagaaactatctacaattcagtattacaaatcccaagccctgagtgtcctattatttttgaaaaaagatgttaacattgtcatatgtgacaacatagacggactgtcagaacacgggagtaaataaacaagctagttacacagaacagatactgtatgatttcatttgtacgcagtatcaaaatcagccaaagtcacagaaggtgaatgatgctttccagatgctgtgttgtgatttcagaacttcagttttgcaagcagtaacagttctgaagagctagaccccgagttaacaataactgtattccatattgaaagagcattaaaagggaaggcctgatttaatggtggtttctccagaataaggaaggactagctatacacatacacatgtggagagaaccagaggaggccaaaatctgacttagatctctaagcattctcatgcctatgcacaagcttagagtagagtatccactgatttcagtttttttcccattggcaattattaaacatagacattgaattggctccaagaagtaagtgtgtgtggggggagggagcgtgtgcatgtctgtttctatgagtgagggaacatggaaaatttctaggaggtagactctgacacctacaatgtagagctactctgcaactctgctaggagaaggtcactgagtgttatgtggagttaacctgagaacagcagtggagttggcaataacttctacaactgaaaaattctgactcagttcatcaggagtagagggtcttccaagtattctgctcaatttccattcctttggaaagcaatgaccccttaaagtaactaaagcagttaatagaaaaagaaaataatatggttgtttccagaggctgagtggaggagaaagagaagggttgctgttaagtgggcacagaattttggttctgtaagataaaaatattcgatcgatctgctgaatcacactgtgcctagtgctacaggctgcctaagaatactgatagtagaccttggcttgtgtaagtccattcagttggaaagagaaactccaagaaacagaactattgttctggctgcagtggaacaaggtgtggtggggaatcaaacaaacaaacaagcaaaaaactaaaataaataaaagaaaaaccaaaaaggaaccaagaccaccaccaaacaacaaaatccaatattcaaatgctccttattctttctgtagtttttgtttttgttttgatttctgagacaggctctcactttgcaacacaggctagcatgaaaatcactatcacggaggatgtctttagcctatggtgatcctcatttcccactttcctgagtagttaggatacacgcatgaaccgcctctccaggctgggattctctctcttttttaaatctttggaatacattctgttttagcagggtgggtaaggggaaacaattttcacttacacatacacaaaatagtatttttctttaatctacaagtgcctaggcattgttaagacacatgagcaaagtgtgccagaatgttaggctgttagttcttttgcataaaacaatctaaacacatattaactgaatagcagatggcagagaaaagaaaaagttagattcctgtgtgggtgaaacacaccaagtaaattctgtaaagatggaaacctgggcataaaagataccatattgtaaaagcaaatggaatgtttcatatgactttttcatcttttcagcttttgatttatcctgtctttataaatagatatattctctctcattctctctctctctgagacaaggttttatgtggcccaggctggccttgagctcgttatgtagccaaggaccattctgtctcaagtactgtaattaaacctgtgtgtcaccatacccaggcttacctttgtacatgtaaaaagtatcttaaattcaggaggatacatgttaaaattatttatatgttttaattaatatcctatttacaagttagctttttaatccaaataaggcaaaagtggaaaaaataagagcaggtattagaaagtgttgctaagtgatttatatatttttcttgttttcatatttttgtgtacttgtacattttatcttgtttgtaacttaattttgtttcaaatgcaaataaaagtcaggattaaaatgaacatgtgaaaaggagtcattaaaatatgtgtgcatttactatttgctaagaaccttctgctaatgaaagtaacatctgatctaaattacactgaagctgagatgcagaaactaaacaagagcaatgacagatgctagatctagagaaaacaatgatacttttaaaagaagaatttaatattcaaactgatcattgtagagaaaatagcaagataacttagtactcaaacagctaattaatgtatttttacaagaaaagagttacgtgattaaaccagacttcaaagtactatttagcttgatgttttgataacagtataaacaggaaggcatatgccctgagctaacaacaactgaagaaaaatggttttgagagacatgtttgattttatacaaattaagaaggaattgattaaatgggttaaaaaaaagatgtgaaaaagctattttaaaaggcatataagtattagagaattgtcagacttaaaagggttacatttataagacaaatttcctttgatctttaattgacatattttgccaaaatccctacttactcttcttcctgtttatatttagtctgttgtctatgtataccttccagaaacacccaattaggaacacaccagtgaagcctctaaaacacaatggaaccatatacactgctccccaggacacatgtacatcaaatatcatggcaggtcatgacaggatctctgctactgtactatatgcccatttgcaaagcaaaagccaattcatcaaccacagacagtcaatgtggctcaacagaactgcagaccacagtgctgttcctcattgatggggcttggctgaaacctcacctcttgcagcagttctgtccttctgagaccagaattttatgcagtagttatcagtcagaaaatgccactgtatcaaccccttctaattttcatagcaaccatctctaagctctaagaatcaaatctgttttgcatgcatacaagcaagtcctaagtcctggacaggtgggtagctagctatttgtgtctttaattttgctaagattctaaaacagttttgccttaattagcttttcttctgagttattttgatgctaataatatatggctgttgcattccttgtacatgttcccaaacagtgatacaaacattattaaatctaatcagtgtttatagagtattccatatgctacccactgtgaatctttcgaaatgtcattttagtggataaagcattgggaaaggttggtatatacaatgacatgcttttgttccctcaatcagtgattttttataagaaaatttctacagatagtagttgctttcaatttatttttgtccacaatttgaaaaagagtatttggtttgttagcattctatagaacatatatttaaattaaaaaaacctttcagctgcagagtataattatttacatattttgactacattacagaaacaatgatctgaatgtcttcaagtgtattgcatttaaatgaaacatccaagaaccatgagttaaggaatatttagcagaacttgagtatggtggtacatgacaaattcccagcacttgaaagacagaagtagcagtcttgctgtgagttccaggccaacctgggcttcattgcttgctttttcctcaaaaagaatgcacagcaaaaaattaaaatgtgataccccttctaaaatacataaaatatcattaggaaaaaaaactacacaattccagacttcactcttacacaggacatttctattactgcccggattggaatattgctgtattttataatgtccttcttgatttttatattaacaattatatgagttacctttcttgttgccatgaccaaaaactgacaaaaatgtaacttaaagaaggaggagtttattttggtttacagttcagagtaacacagaccatcatggcagagaaaggcagcaggaggaagcaagactaaaatagactgtttcttttgctagttggctacaccagacagctagttcctgccacacaaagcttcagtgtttaaatacattaaaatgtgaaggacattttacattctattctcattaggtacaaggtcagtcaggcagtagacaatgtagactgttaatttacttcttcatacactgccatgtgcacaaatagaaactgtcaccacttgagtcgtggtctttaaactctaatatgagcaatatgtgtgtaagaaaaatgaactggttatgtaaatggtaacagtcttacaaagctgatatatattatgttatcactgccttcataggggatatagaaagagccagtctggcattgtctattgggcattaatacaaccttaaaactatatgggcctttcctgtttgtctactgcattaaaagtagtttcttttcgctcaaacttatgtgtttgagtactgaccatcacaatgtgtctgctagattagaaagaacaagattaaaaattaagatgccatcattaaaaatacaggagacaaaaagaaaaatatcctttaaaaacaggattcaaaaatgtatcctttgactagttcattgtataactgctgaatgagggtttgactgttttgccattttgctgattttaggaagttttttaaacacctggcaagcaggcattgtttttcatcctcaatgaaaggatttttttaaagaagaaacgggagtacagttgccacctgaacttattatttatgtggtacatctaacttttagctatgtgtgccatttatatgcttctcttattatggccttgtatataactaaacagagctctccttgtcacaagtttccaatcacccctgatgaaaaattggcagaaccatttgagaaagtggtttcccaaatgcaaatatcattattaaagtctttgaatcaccaaactctatctgtttaatatgtttcattgatagcagtttcatctgtagtcactagaatgtttatcttataatcggttatttgtagattcagattctcttacagttggttattagtaaatccacattcaattgagtactaagtacaaaaggtgacagtggaattgcagaattaggttcaacaatttccttggttgagctcactgttgtaaagacatcttatttttgagcatactttttaaggactgaagacaagttcaaaaacactacaatgatgaggaggtaggacagtttcaaactctaggacagcctgtattatgtagagagatctcatttcaaaaacaacatcaaaaccccacccatcaatccaccagaaagtcaggtcagaatacattttaaagggtttcaattggtaaagatataacatggtttacagaaatgcaaaaaaaaaaaaaaaaaaccttctgtagtaacagcatactttttaatcgggaagaaaagctaaaagcaaaacctctaatctaatttatgctgtgaatggaagtgttcattttagagggtttccttttcttcttaagaaactaatcaaaatcattagattccagtggactcacccaactctcccaaactgtacatattaacccagtgtctaagacttggacatggtctccaatgtttactctccatatgcctcaggcacacacatgtaattttgtgcttcaaggagtcagtgcttcataaaaacagagacgaatggttataaaacacacaccagtgcccgttggaagtaattaaaaatatggccctaccctgtattcatttcctcccctttaggcattgcctcttccacatcctaagttcagcttcccctctaactcacaaaacaaatctgactgctctttgtactctctcctaggtaaccatatgcttagacatacagatatgtgccaagattgatggtactggacatctaagtccatttgaaatgaattaatatgaataagtataaactgatgtgaatgccagttccaattcctaaagtatacaagactatgttttaccttgaaaacatgtttgtttgtttgtttccacatcaataactataaacaatatattttcattaaacaaagagagacatgcttttgatgaatgcataacaatctagttaatattaattttctaactctattatgtggacttttgtatttgactctaacatttgctaatccaggcacagaaataaaattctttccaaattgtgctgtgtgccaatatttctgaaacacaaaaattagcatgttatttatatgagtatgccagaaatcaaactatgtcttatattattttcagcaaacactggtaggcaattttatagatatgactagtggccatttaaaacacatactatgttctgaatagcaatgctatagttcacatgctatacatgacctcgggaatattcaaagcaaataatgttatgaagttctactatccacagtattcttaaatttttttgtcatatcactgcaaatgtaaacacaatttcctagtacacgattcagaggttaattctctagcactctcttcaaatccctcgctttgaaagaattgtataatgctattcaagtgcttcagcctagaaaatgtgctcctattcagtcatcttatgaatgatatcataaagggtaactgacaaccatagtgaacttataaatactaaatgaattagtaataaaatcgctcctaataccatctgaaattaaagacatagcctttaatgaaaacaatattttatacttttctttttgctcttctgatgctatgttatgtaattcaagtaaaagaaatgataattcctgtgattcaggaactaacacaagaaattatacaatggtgcaatacaagaatttattcagaaatagttatagaaaaacagtgcaatattgagagacaaagtcaaaggtgaagaatttgttgcacttggcccatcatgttcctggatttaagaaagaaggttctcgtgagggaaacgctttagtttcttgcaaaatattcagaactgattaatctagaagctatacttagacaaacagtcctttaggctgttaatccacttatggtttgggtatttcaagaaaatgaataaggttttttcatagaaatatgtctagctgtagaaaaattaactttcaaagagtacatttaatattaccaattaaatttatgatggtccccacaaattcttcttatacaaaagttcattgatcacctcctcagtacctgatggcattctagaattctaggtacatacatacatacatacatacatacatacatacatacatacatcacacatatacctacatacatacaaaatgtttttgaaatagggtcttatgtaactttatctttcctgtaactcgctctatagaccaggctggcttagacacacagagatccacttgcctatgcctcctgagtgcttgaattaaaggtgtgtgtcaccacgcccatctaggtacaaattcttatttgaaacaatattaggagacttttatatcagagattctttgaagttccggtgtcctataaaagagtcaaattttaactacaatggggaaaaagatgatcattttctaaacttggatgacaaccataaagtttctgcatcccactggacaagacaatgaaagacttgaaactccaaggactgctagataaagtaaatatcttgttggttgaccctgtatctaattttattttaactgtataacctgatttttcattttttttaaaaaaaagatcttggagaatcatgaattgaaaatattccaactcaacttgcagatttaaacagctaaactgaaaaagagtatcttgaagaacttccaacattcctactctggtctttgtttcagaaagaaaaaaaatcctgctacaggtgctccttaaagaatctcctttgagtgtccttatgagaaagcattttatgtttattatgttaataataatgacaaaatgagaagctttacttaagtttaatgtttctttaatcttgttactatcctttcttcattttgggggtgatattgaagagagtagtgatggtttgacaccttaaaaactgtaatcaagtttcagtgattacaatcacagacaaggtcagcatacggtgttcttaaagtggaaagaaacatagataattactactcccttcagtcacattcaggcatatgaataggagcaccatcgtcacattcctttgaaaatgcaaagagtcaaaattcacaattctattaatttctctctgttatcaattgtcaaaaaatattacatacgaaaagggctcagatctctaagatcaagatcactgtgatttagtgacattttcccattccaatcactgtatgaattgaaatatcttactaatttatctttaattatcattaggtaataataagcacaagaacaatatttgcttataatcaactaaaatatatgaatgatcccccaataggaaagaaaatggtatttcaagtctgaattttgttctgtgttctttaggcagccgaaagtgaggtgttagaaaaatgcccttgcatccttaacatgatgtttatttgaaatcatccttacaaggttattagagcttcaatacgttaatcagaactactaacaaacaccaggcaggagtgaagtactcactttgcaatcagaaaaatgtggtgattgggttatataacaaatggtgacatttaatgttttcagcattcacctgctttagttcattttaaactgattgtacctagaatggacacagaaatccttctggttcaggctcaacataagccatcctgagttttcagaaaataataggagcattacaatagtcatcatgcgattcatattccaagtaatttgctttcccatcttgcctagacaccctgcactggtttctattatccttctgtttcaattcgtgctgttcctattatggaagctagtgcacatctaactttttcatttaacatggaccccaacacataaacacatttggcccatccatacaagatggttgaagattctgctcaaggcaaatggaaacccagagagaaactagtcaacttgtcaaaacatatttttcccataatgaagaaattgtctatctaaatagggcttgggttatggagtgaaaaagaactaggatgtcttccattatcaaattgccatattcctattccaagtatacgcttgctgttctctctctctctctctctctctctctctctctctctctcnnnnnnnnnnnnnnnnnnnnnnnnnnnnnnnnnnnnnnnnnnnnnnnnnnnnnnnnnnnnnnnnnntctctctctctgtgtgtgtgtgtgtgtgtgtgtgtgtgtgtgtgtgtgcgtgtgtgtgtgtgtgtgtctctctcccttccacccttccttcctttggtctttgtaaattagcatatttgaatacaaagtaatagagtaagaacagaaggggaggaagaaagataaaaaggagctggggaagtagaataattgatagaacatttgactagtatgcacaaagcctggacttgatatccagaactgcatttaccaggcatagtgaaacattctacattctttcattctagcagttgaggagatggagacaggaagatcaaaaattcaagggtcaattctttgttacttagcgaatttaagacagcttgagctatatgagacgctgtttcaaacaaacaaacaggatagacagacagaagaaagaaagggattgggaaggagaatgactgtgtttttaaatcgttgccttcctggtatatatacaggttgacaataatttttatgactcactaagctaagtggataaaattgtataaggtttctgatgcaaccagctagagggcattggctatctaaagagctaagaggcttgctatctcaacactaagaggatatgctttgggaataggctctaaatctttaattgtagataatttagaaaaaaagaagacaaactacatagtaacaaatataattaaaatgcttgttagttttccttgtgaagatcagaaacacaaacatatatgtatacatacatacatacatacatacatacatacatacatacatacatacgcatatgttttaaaggatgtcagatatagttatttaggtgaaattcacataaagaaactaggatagacatttgaggaaacactgatcaccaacttaataactgcgatactcattttgtgcatgtctcatttgatcttcacaatggagcaatgcactcagagagcttatggtgatgactaagatgagaatctacgttcagattctctattgtaagttcctgttctttcaatcaaagctgtgggtttttttaaaaaatttactccagaagaacaatttcttttcacagtcttataataaaatcccgtttataaaacatgaaaattgagctgggatgtatgaacgaacacatggctaggagaatgaaaatagatgggagtttccaatttcatcaccaacctctcacgtttattgacagaaatccttgggagtcttgaagcatactttgggaaatggctgtattgtattatgaaacttcacaattaatacatacttgtgttaatttctgctaaaaatacagaaaacacaacagtatttctgctctatcacaccatgcctcctattagtgatttgtgtacttaagacaactcattttaaatgccttcaagagaataaggaaatgagcaacccccaaaagagaatgagaaatcaaaatgtaatcagacatatatgtaaagcatgcttatatatacaaggtagagttttgtttctcatcaccatcaatttcttgctttatcatatgtctgaggaaagaaaatgctaaacaaaaagtggagcaattctacttttaatgagtgtctaacacaaacatttcacagcaacagaatgaggcatgcctttcagtgacttagggcatcatttatgttcatacacaatttatcatcttgaaaacaggagcctgaacaaacagctctgatgattactaaatttggacaaactgaatgactcacttaagttttctgttaaatcctctaacacctttttagtccaattctatttcttccctcataaactcaaatgcagaagaaatcatcttccatagtacccaaaacagacaaaatcacagaaggatgaacaatcaactttaactcatggtacacaaatactgtgatgtctattaaaattatgttatcagcactctacttagattggattgtcactcaacacaacatattttcacaatattgtactttgccacaatgaagtcacctcataccttaatacccctaaagaaaatacattgttaaattctttcctttcatttctatggacacacgtattaatcttattcctgccatgtggatgagatgtcgtcatagtgctcccatgtcacttgatcacagaacattaagtcaattcttgaagctaagcattactgatgttctagcatatggaaggcagggagatcctaagttccagaataggatggattacagagtggaacactattataaagaaaaatcatatcaaaccaaacaataaacaaagaagataatcattccaaattgtatgtgataacacagaccctagctgaatatcacctgatttagagtgacaggaagtcataaaagaatataataaagcagggaggaaacaagtttagacaataaaagtggaaagagatgtggaatggtgttttaaaaaaggcattgaaatcacattttcaaaccgtattacctaaaggtagcatagagaccttcatatgggaagctagccacacctatcaatagttattactaggacagttcgattactttgtcttcaatatgaacacatatatgtgtacacacacacacacacacacacacacacacacacacacacacacacacacacacacactcaaacagagtaaagcatacatatgttgttgttcagtgtctgcttgtggccattgctatgcatcaaaagaaacactagcccaaaatgaaagttgaggaaaccaactccaaagctgactacctctaaaagtgcctggtttatagccttgggctcacattatttcatataatatcaactttactaccaattgcttaatgtcagaagcctgacaaatgtttccagattagagtcctttcacctcccacacatctattctattctttcagtaaaattatgcccatttaactttcaaaaatagaaattttagacaatgaactttctactgagtgacagtggctaaatattgagaatttcacatgatttaaactgatacagttgggtaactgagtacatttttgccatttgtactaacactattgtgatatcaagtattattatctctagcctggattattccaatagatttttctgaccttctattattctcacaggggggcctgggaaagcagtacaaaggatttcttttaaattctctaaggtattctttaggaatagaacacatatctaacctttatcttttactttccttttccctttctccccagtaaggtcatggctgcttacacaatgactttcttgttatatagattagaatggccagaggaaaaataagtttaagactttatgctatcctggataataaaaatgtctcctatgttttctcatcccagtgattccacctctcaagaactcaacctcatctgtcacaaagggatacgacatctactactttgcacaagtgttattgaatgcttccatttatgaaagtgggtgggaactgagcgccatgtgagaacatcactttcttcagtgacattagaagaaagttgctgtgaaacgcatggcaactataaccagattcagaaaaattattttttaagatgaggtttctaaaatattttctataggagtgctaaaaatgatgcagggtgggggtcattggggaacaaatgcaggactcatgttatactaggcaaaggccctacaactaaaatgtcctcatctctaaaataagccattttttaatttgtaaccaaagctcctttaggttctgctatgaaaaagttgctgttcattaatgtagcatctagagatactaatctagaaaatatttcatttaagcattgagagtgcatcaatgacaactaattatgaaaaaggtaagccacggataaaagaaaaccattcaatgaccttttgattatataaacttggtaagacatgaggcttctgggctgaatagaaatgaatagaaaatggaatacagaggcaaagtgaagtggtggcatttgaggattagaacagccttgtgactttcattatcagaaactgtaaaagcacagcataggaggatttatcatctgtgaaggagtcaagagcctaaaagtaggctaaacagcaatgaaatattatgtcatttaacctagtgagccatcttgatggccatgattcttttgtaatatcaaaaaattactgaaaagtagatgacattgtggctacatttggatctgtgcttcaacctacctaagctacacatattactatagtcaggttcccaaaaagtaggcagaaaaatactagagactcggggtgtaactcatttgtagagcacttggctagcacaaggttgtgagttccacaaacaaagccaaaaggaaagcaaacaaaactcaggagaaataatctgcctctaaaggagatgtagtcgtgctgcccaagggatctacagtaacactttttgccagctaatgataagggctaaggaaatgaacacaaggagtacttgaaatatgttctagtccagtggttcacaacctgtgggtcctgacccctttggggatcaaacaaccttttcacaggggtagagtatcatatatcctgcttatcagatatttacattttggttcataacagtagcaaaattacagttatgaagcagcaacaaaaaatagttttatgattgggggtcaccacaacatgagaaactatattaaagggttgtagcattaggaagattgagaactactgttatagtcatactgaatctaaaacctgtaaaagcttagtaaatataaaaatattcaaatggactgcagagtcaactcaaacaaagtgtatcacttgtacatcacatttaaccatcttcttttttcattcaaaatttaattatagctacaataatataattagttataccatccttcaaaaaacttaaaataaaacacaaaatttgagaggaaaattctgggttgataatttcattcccctaaacaattagaaaactaatattgctatcttgcaactttactttactttggagtttgtgtgaccttgttggaggaagtgtgtcattggagtgggctttgaggtttcaaatgctcaaagctaggcccagtgtctctttctctctccctgatgcctgctgatctggatacagaactctcagctactctgtaacatcacgtctgcctacctgtcaccatgtttcccaccatgctgactatggactaaacttttggaccatcagtcagccacaattaaatatttatctttgtaagagttgttatggccatgttgcctcttcacagcagtagaaatcctaactaagataccacctgatcatgcttgatcatgctatcttgtaacagaaaaggtttccctttatgatatagggagggatattttaaaggaaaggattggtttgccacatgagacaaaaggattaaacttgaaaggccccttagatactccaagttcttccacaaatgcttattctctcctccccactccggctctctccatccatccctcccctctccctctctacagataaggaagaaatagatggtgagtgatagacagagagacagcagaaattagtacatcttcctttggccttcatagttgtttcaagggtcagacctagtgttggatagggaaacaaggtctagatgttacagagacagggcagatgccctcctataataagctgtcaccatatttggaaacttcagacatacttatgaaaatattccttttcacacacagacttatcattagccactcaagaacaaatcccacagtgtgcatacattttactgaatggaacgtttacaaactaggcatactgtatctacgaggccaattcaccagtattcagtgaagcataactatttctgtattatgggaataaaaccttagtatcacatgacaagatcatcttggtaattagacagtggctttctcaagtcaacttactgactgtgtggtcctatcctcaagccttatttatttacctaacaagaatgaattttttagacacttgagaccctgagagacctggtctcaatggaaaaatcctgaatttatcttgtactactccattcacaatttattacctaccccaaatccaattaaatgtaacaactcactgctccttagctttccgatttccctgcttctcatcctcttaaatgtctctttggtgcagaaagtctttcttatctccatccttacttcagatacaaagctgaaagccagttcctttgagatagaggataaagttccaaagaaagtgtttatctatagcttccataaggctaaggtggataaatattaaaaaaagactctgggggaagtggatttcaggctgtggttctccagaaacaaggtagaatcacagcaaccaaaggaaaaggaaagtagaacgtgtatgcatgtggaggaggagagaggcagtgaatagattactgggaaacagagaaggaacatgattgcaggagggctgctactgccttcacactctctgaatcacagaacgtccattgttcatcaacattctatccaataaacatgtgtacacttggtgggatttcttcctgaatggggtaagcagtctttctgtgaaaatgaacagcagcatgagaagacttgaagctgccaaatgaggtgacagcatatagtggtgattataaggcatatgtctacaatcctgtatctcactctctcagccaatgccacctttgaccacggaagcaacataggaaccaaaggaagtatgctaaattctcctgtttgcacttctgccatgccatgcctgcccgcctgcctgcctgcctgcctggcttccttcttccttccttccttccttccttccttccttccttccttccttcctnnnnnnnnnnnnnnnnnnnnctctctctctctctctctctctctctctctctctctctctctctctctctccctcccttcttctgagagagaagaaggagagagacagagagggagagagggagggaaggaatgagggagggaggagctgggggaagatagagaattgttgagtaagatgcatctattgagtaaaagtaaatatagtgaggagacgaggagatgagtttagagtttgctgacatcttatgacacgcaattatatatgcctacaatgatactatgccagaatatcttacagtagttgcaacaggattactcccagacccaatgccctattgtcttcatcctttctagtcaatggtgttccacttattttgcagacatttatttttctctggccgaacacaaatgtaaaaacgacaacaaaccgcttaggcatggggttgttgaaagcagctccaggagagaagaaatatcatttatcacaaatagcaaaactgtgcttgtgacagtcccttgccttgttgcctttccatttttgccagagttttcagcataggatctctcagcacctgcccttggctatggcatgggaggatttgaaatttcagtttgcatggtagtggatgtctaatgattttagattgtcttttcccaggagttttggacaaattgtgaattagatcactgttggaccatggtcacaacaatgatgcatggtgaacagtgccttgaggaactgtgagagagatgccaggaaaaacggtatagggccttttacctcaggtgcattttgttccctggattgttcttggtcatgatttcatgcgcctgtgacaaacatttacactcaatttgtaagacatgctgattcctgttggatgtcagaacatagctatggaaaccaatctggtgaaaggatatgctgagtgttgtcctcagtgtaccctgaatctggatatggccttctgcctgcttttgtgttttcccagatagaatctatatagtacgtgccaggcaattgtgtatcaattgctctgtcctgagtaagttctggcaaagggaaactctgttattatttagaatgtgtttactaaccttaatttacatgcgtttctgaaatcaaacaacttttatttgattattgctttctttctttttatctttttttttgggggggaggttcgagacagggtttctctgcggctttggaggctgtcctagaactagctcttgtaaatgaggatggtctcgaactcacagagatcctctgcctcctaagtactttcttttttcatttgtgtataaaagtgcacagaaactgaagtaaggttgtctacagcattagactggagtctgccccattctttcaggtcctcagatcccaggtctcccagacactgatctgcagagtttggtttaaaagttgacaaaatgtgctatgtacaacaaaagtagaagctataagaggatgtgaggatccctgaagaaggagttgagcagggattaatatggggctaaaagtaggaaaaccagtaccatcccaaccgtactttccacatgctcattctcactgctgtgcagtcctctatttgttctctctggatgtatgtagtgtattacctacatttctatttctccttgacattgtacactgccttatgaattccaaatatatacaattatcagtcctttcttatactgaaacaacaaaacatactaattgatacattaaacataatcctaccctgttgatagcaaaacacatactttacaatgtagcaatgactataccagcatacagaatgcaatttctgaaaagatagcttcatgtcagtgtttatatgcaacagcctcctttattaaaaaggaaacagctataataaacacaaatcagannnnnnnnnnnnnnnnnnnnnnnnnnnnnnnnnnnnnnnnnngggattgacatgtaaagcaggaatcaaacatcatgagatgaacaccatcatggggatgtgtacaagagcttttcccatatgggattctctgctacttcattttgaaactgcataagtaggacaactgtttctagcaatatatctatccaggccatttccaatgttatttccttctcagtaatggttcaaggaggattttacatgttgtaacatgaagtttttttcatgatcacagcttcatgcagtcacaccttaagagtgttactgtaattgttcaagctcagccagctattttcacattacgtgattatgctattacatactttttgaatatgttatgtaacttctaagacagaataatgtttacaaactgacagtgtttagacagtatttatgatccattgttgtaactagatcacaggatctgaaagccatatgctatttactcatcaactttaactaacttggcaaaacactgatgcagaaattcatactatttccaaatccttagtataaagcggaacatcatttttatttatgtagtagttaaaatcattctgttctttcttctacttctaaagcaatcctgtttagtttttatttcccatgaatatttcaataagaatttcctataagcaagacactctgttaataagggctatatgcatcttgcaaatggcattttcctttttttttttttgtctagcattcgtttcactcacacaatcaacagataaaaagaagcagcttgaagccaggcatggtggcacgaacgtgtaattctggtactcagaaggcagatgcagaaagatctctgcaagtttgagaccagcatgagctacagaaagagcactatggcagctagggggacataaacaagagtttatctctaaaaaaaaaaaaaaaaaagctttgattacctttttgaaaactacatgctatacatgagaggttactaaacacaccacaaatgtacacacacaggggtggggattggtgaaagacatggtaaataattaactattttagaacattgttttataacccagctgctcttagagacttacaataaaataacatgttaaaagtcactagatagtctgcaataaatagaacattgtgtctgtgtttaacctggtatatccacaatttatttgttgtaagtattccacagaccattgccacattttatcttttctttttcaaagctattttaacatcttctggaacaataatgtatagagtacagtttaagagaaaacaccaaacctaataaataaataatatctcccatatatgatctaacataattttaacatcataaacatcaaggtattgtaaccctttccttgagaatgcaaatatatcaagactgttatgaaacattttctgaatagcacaatactaataaatagtatatatccaaagtctgatatacaaaattatagttgcttgtctccttttagtagcaaaaccagatcatctactattgcagtgtttagatgcagctggaaaagtagacacaattaagaaagggaccatgatccactagatgctagtctaaagtactttttgtgaaattatctgcatcaatgcatgtaaaatgcaagccacagatatggatatacttatctgaacaccatgagagtatcaaatacagtcacgagttaagcaaaggccattcatacaatgacttaaattttcacatctgtcacattattaataaatatggaacttgaacttttataaaaagttaatttattacctgttactaatagaatgattcattttgcacatgatagagtaaaagaattaggtcccaataagactgtgaagttccgctggcttattctctatctaaaatacatgtcacataattatgatatatatccatcccactgcccatagtgttcattctttgcaaattatttaggctttagttcaatggtgaaaattctaacgattttttaatcattattcctgaaataggatcagagagatgcattttctagaacatataggataaagcatcttctttcattttcttatacactccttacttgacagctccttatctttggaaatgcaaatgacaactgatgtgaataacagcattcttagtactgtggatttggatgtgatcacttgccaactagaaaaggaatcaagagatcattcaaacctttcaaattggtcattgccaatcacaatctggtatcagagttgaaagagtagttctcgatgaatacatatattattctgtagtttcttcactatgtacacttctaagaagttataacaccatatgcattacctaggcaattacagactcgaggaaggcccatatacaatttgttatctgaattagtaaatggaaagtttataagatttcaggtgccagaaagtcaaaaacaaacttacatgcaaattcttcagaatacagatctacaagcatgacaccaactggcaatctaagcaaaagtggagaggctaccctaaatgcccttcccttataatgagactgatgactaccttatatgccatcctagagccttcatcaagcagtgactggtggaagcagaggcagacacccacagttaaacactgaactgaactggaatccagttgcagagagggaggagtcatgagcaaagagatcaagagagggctggtgaaacccacagagacagctgacctaaacaaaggggagcgcatggaccccagactgatgtctgggaggccagcataggactgttccagatcccctgaatgtggatgtcagtgaggaggcctaggcaaactatgtggcctctggtagtagatcagtatttatccatggtgtaagaaaggactttgacagcccattacacatggagggatgctctctcaacctggacacatgggggagggcctaagccatgtccagatttatatgacagactttggggatcccccatggtggtccttacccaccctggggagcagagggggcatggggtggggggtgaaggaggaggagagggattgacatgtaaagcaggcttgtttctaatttgaactaataaaaataatttcttggataaatatgatattctttaaatggaacagaattctaaattgcctatttgacattaattcaatgtatccttcagtcttacagcacataaatggaaacagaattttttgaggcaggatttctttgtgtaaccctggctgtcctggaactcactctatagaccaggctggcctcaaactcagagatccaccaacctctgcctcctgagtgcggggattaaaggtgtgtgccacaaccaccactgtgataaaaaacacagttcatgttacatcatttgtgtctaaaatcttgttagcaagcctcagcatagtttttgatctttcattataaaagaaaagatgcaataaacaaatcttaaacagtatttgaacaaaaagaaaattgccatggccttttaaagtggggtacaatttagcattgatatttcatatgaaataaattacctattgatggtacttattatgtatctttgaccaaagggtcttaatttaaatttgattatgatgagcacaaccacaataccatccacagaaagaaaacctactggtcaagctttcttaaagcatgttttctagggttggactcatacaaaataagatttaaacatgtaagctagaacataggaccctctgtcctttccttgtagtactgttcttttctttttctgtttgtttctagtattacgtatggaccctagagtctcacacataccagctaagtactctaccactctttacccatttcccatttattttgagacaaagtttcatcaaatggcccaggcttccccaaaacaatatctccatcttcttaccaactcttttttttttttttggatttttgagacagggtttctctgtgtagctttggagcctctcctagcacccactctggagaccaggctggcctcgaattcacagaaatccacctgcctctgcctcccgagtgctgggattaaaggtgtgcgccaccaacgcccagccaactgcctaactctttttaatctgttctacaaatgcactccaaaatgaaacatcttaactatatgtcttgagggtcatcctcactgagatcctttattatatgtgagtctaacttgtattttcaagcacatgcctccttcccggaaagtacaagaacatagacagaactcattttagcaattttactattattattaatggtgaatcaagaacctcagcctaccctaatgaaggccttattgataacaatgaccgctatttacagagtaccacataccacataaaatacagggtatttatattttaccttagttggaatgtctagcttacattatttttctatttatatataatttcttctttcttgagctagaatgtatttttaagtttattgcaattaattaagtcccacttatttctgattctgactcaaagatacagaaaacagttcctgggaagtaggccagcaaaaaacatccttccaaattagtggtatagggacaaacccacacagggagaacacatgtaacagtatctttatagtaaatacgaaaaaatagcctaaaacctgtattttgacaaaataaatccttctgcnnnnnnnnnnnnnnnnnnnnnnnnnnnnnatgacaaatttttagaattgagagtattcaagtaagatataaaaacatgacttctcaaatatcttcattttcttttcacaccaagattttaagttgggttacataggtatattgtattaatcacgtggtagattcatttcaatattaaaaatcaaattataataagattccctagactattccttgttattactaagtagagatagcattgataatgtcagatatatccaattcaaatgtttgtcttgagaaatttcaaaaaacccacaaattattataaatcattcactatttatttcaactaaaagattttccttaagtttggaagcattaaagatgattaggaatcaggaataggtcttaattttcagcaaaaaacctacatcaaatcccatcattatagtaatactcatcttggtaacttatttacccaaatcactgtaactgtagcatttcccccatattctctacttcggtacaatacataaaaagaaaaaaaggagtgaactacaaatcaacactgaaataaactggcagtactgtttggggaattggatacttttactcactaactcagtttgactgccagtggtattttgataaataaaaatctacagaaaaattgacaaatgcatattaccagcagatggtcagaaaccttgttctatataaatctacagtgtatataagaaagaaagtatgttagggtaacatgcctgatttcaatatcttctgatgtttttatattgttttcatcctgaaaatggagcaagttcatgctcaagaatttatataagctgttaagtgaaggtcactatttttatttttaaaaaaatcatttcccaataggccttcttaccactctgttttctcttattatttgttgcttgtggaatttctgtatgtcagaattggttagctcatggtgctaatgaggccaaggtcatgagtctgattctcatatgggccatttagttttatacaaagaaaaagaaatatgttctatatcttttaaaacaaggaactgcaactgcagccaacaaggatacaaatttatgtccttggcaagaataaaaaccacaaaaaggggctctggaaaaaacacctaaaaacacttgtcttgataacagctaattcttacttgagaagattcttcttcgtgttcagaacgagagtactgtttctaacgagttcacacaacaaattgggagagtaaagtggaaaatcacaatcatgcaaattatacattaaatattttcagaatccattaataacacgtgcttacatgtgaaagaattgtaatgcttccagagggaaaagaagtaatacatacacatggtggcaattacatgttccaattatacatgcacacaggataatgcataatatggataattataaaatcctacacataaggaaaagcacaaagttaacaattttagggatagcttaatcattgtgtgagaaccaaagtttttcagcatgtaattaggtttgcttagagcacaggctaactgagtgttaatagggaaattcctatgtaggcttaatgagcttttggagcttctccgtttttactttgattttcctttttttttttttttattttggtgtaggggaatcccaatgaactacgctgagatttatcttaggacagtataaaaatagactattgagaagaagagtctggagaatctgcttagatgaagactgttgaaaagtaaagcgagtttggcatgatagtacaaacacttactttaagcagttcacactcaagatgcagaggtaggaggttctccatgagtttgtggccaggctggtttacattgtgagttccaggacagccaggattacatagaaagattcccaactaaaaaataagaaagagagcttacatagaaataagcattgacaatatggatgccaatctattatagaaatagggattatagcatcactcatcgaataattgcatgatgagattaagagtcttaattataaagcaagacaatgtggacatgaaaccttgttctttcatttaatgtcttttagttttagacagctatctaatttccttgtatacctgcagatccaaatggaaaatggagatcaaaataactcaattagtaggatggttttgagaatgaaagcctcagtactgcacaaatagtgaagatgttatcaatatataatagttgttgttgttgaatatgacaatacaaagaagtcccaaacaatccccagtgagagaaactacacaactgagaagagcagtgttaacattcaaagaactaggttttagaagaagaccaatgattttagtgcttttaaaacactaagtttagggaactggaaatacattggtgtgtgtgtgtgtgtgtgtgtgtgtgtgtgtgtgtgtgtgaacaagacagctaatggtttaagagtgaagaaaacagggagatataaacatgggagtcctctgggtctaaagattgattgaagctatgagactggtgaagacagccaagggaaataaggaaagaaggaaatttcagaagtacatgaagtgattcatatccaaaggcaacagaaatgacattaatggaataaataaattctaacttcatgtacttggaattccataaacatcagttgaaaatttgctaaattatcaaagctactctctattttacaattaaactgtatggtcgacatatttttgagaaaacattgtagtgataataatgaataacaaatagtttcaaggttcaatagagaatgatatatcttaattgttatgttaggtactatcgatttttttcatgtggttgcttgacatttccgtaattgtctatgggaaataagtaaaaaaaaacctagtctgtttcctataactaatatgcacaatataacttaaacaactcaaagaaaatgcaatttctaagaatgctttacaaagttctgtagaaacaatctccaataaaataaatacattagaaaatgttattcactgtagatgttacttcttcctgggtctcactttttttcatacataaattaagatatatatgctacactatttctgaattattttcaggacatcataaataatctaatgtgttctctttataaaaatcttgcttagtctatcaatagtaaagaaaacaaaagaaaagcaagccataataaaaatatgggtaaaaatcagagcttgtctgtgacttaagaggtgaagtccagtattgacattgaggagtggcatggacaaacataaattgcaaacaggatacaaaaggagggaatcacctaggtaaagggtggctggtgggctgtagattggatctagttaatttatttagtgaaataacttccttcaatctgtttatatataatctcctctgtaccaagcagcttgtattctacaagtctcatttgttacaattttaacttatatagtttttagcatagtattatcataagaagggtaaggtagctttgaaattcaaataacatttcctgcagtagccactctgaactgtaatcaccatttgtgcaaataacaaatgatctcggaaagacaagagaataaagaaaatgtgaaaccaagactatgaacagaatgttgttttcccctagagtataattaagtctaattgcttaaattacaataagaaaataaacacctaaatcaacccaaacatagtgattctataaaaataatcaaatatttatacaagaaagatttcccaaatttagttactataactaatatgaaagagtaaatgtttaaatatctaaagctctagtcttgttaggagtaacaattagaaaagcgaacacaatagagaattaaacaaaaattattagaaccacacaagaaagaatgtagaaatataagatatgttgagttaataccagggtcatatctccacatttagagttggcattatataatgtctaagactacacttggcctcagtccttcgtaggttcatacatctttttaaactttttgtttccatccaatcttctctttcatttaattagagaactctcgtctggcctgtcagctgctttttacttcttaagctcgaatgggtatgcctgggatactactgctcagccatttaaagaataatttttgcatacatttctaaatgactaatttattaagtatccatatagtatctccaaatgtatttaaagtataaaattttaacatgcaaaataagtataatgctaatatagaataaccagtgtagccattgtcttacatgagaggaattggaaaagctaattttctttttctttttatctatttactgctttggctttaaatcacataatttaatcaatagtcaactccattctattttacatccccccccaggagaaaaaactgacacatactcaatttagaaaaaaaagactggcgagttcttcctctgatttcaattttctttgtagcaaaaaggcaaatgagagatttatgtaacagattttttagaggttggccagaagaaaatagtcatcacttcacataagaagtttcttgcatagacttcttggtggtgtctttgggtggtgttgagaccagaaaagacaatgacttcagctacaatctagtgacatctcttgaaacgttgcacacactgctgattttaaagcttcttctagagaaagaaggagtgggtggattcgaggagaaatgggaggttgatgggagagacttcgaagagaggagggaagaaggaatcggaaactgatcaggctgggaaaaattaattaacaaaaattgcttctctaagtagctgttaatgattaacctagaactattagtagagtagaggcataccttttgaaaggttgattcagtcctgttcttataattaattgtgtaacttctggcaaatcacttaactgtttcccttcctataaaccaaggatcataatatatactgtgcttgctcatggagatctttaagagttgggccattagaagctgtgtcaattacaatcattactactaccattgcaacagttaaaattacagaaataaattggggaacttttgcttggggaaagttcatctcttctgctctcagcattccaaaacttcatgttatagcactaccatttgtttcttcattgttctggtcttatttaggcagccacactgatgactatacacatagaggtaacattatatggaatgggaaggttgtatttaagaacatatatgtgaacactcctccattgctagttggaatgcaaacttgtagatcctctttggaaatcagtatggtgattcctcaggaaaatgggaatcagtctaccacaagatgcagcaattccactcttaggcatagacccaaaagaagcacattcctacaacaaggacatctgttcaactatgttcatagcagcattatttgtaatagccagaacctggaagcaacctagatgcccctcaactgaagaatggatagagaaaatgtggtacatttacacaatggagtactactcagcgggggggggcaatgaaatatagaaattcctgggtaaatgtttggaactagaagaaaccattctgagcaaggtaaccaagtcacaaaaagacaaacagggtatgtgctcactcatatatagattttatacttacagcaaaggattaccagcctataatccacaccaccagagaagctaggcaacaaggactctaaaagagacatacatggtccccggggaaaggggaaagggacaagatctcctgagcaaattggcagcatggtggggaggggagagggagctaggagaatgagaaggggataagggggggtgaggaagacataagggaacaggaaggttgtgtagggggaagtatagaggagagcaaaataagagataccatcaaagaggaagccagtataggtttaaagcgaaatcaggcactagggaaatgtctggagatctacaaggatgacaccaactaaccatctaagcaacagtggagaggctaccttaaatgccctcccctgataacaagattgacgagtaatttatataccatcctagagccttcatccagcagctggtggaagtagaagcagatacccatagctaaacactgaactgaactggaacccagttgcaaagaaggagaagtgatgagcaaaggggtcaagatcaggctggtgaaacccacagaaacagctgacctgaacaagagggagctcttggcccccagacgggtcactgggaaaccagaatggaactgatccagaccccatgaatgtgggtgtcagtgaggaggcctcggaaatctatagggcctcctgtagtagatcagtacttattgctagcataggaatggactttgggatcccatttcacatagaggtattctccctcagcctagaaacatgcgtgagggcctaggccctatcccaaagcatatgacagtctctgaagaatctccatggaagacctcactttccctgggggacagaaagggtattgcataggtagggtgttagtggggggcaggggagaagggaaggaggaggggaactgggactgacatgtaaaataatcttgtttctaatttaataaaaaaggagaaaaatttatgatgataagccatgaatgtgttatgtttttgtcattatcatctatctatctatgtctgtctgtctgtctgtctgtctgtctgtctgtctgtctgtctatctatctatctatctatctatctatctatctatctatctatatcttccaagcaaagaaatatttgagggtttgagtacattatcagaatatagttttcattgcttccacctcccattaagtagtcttctgcgaggcagtggtcaaaggttagtaactactactatggttctctgaactccaaccttcagatttaaccggtcttcgatggtacctatgtatcagtatgttttaaaagttcctaaggtgatgttaacctgattctaggattgagttacaagaacttgtaagagcaataagttaaatgagatgtagctactcaaggtgttaagttataaataaggcaactaatgaccagagagaactgctggggaagcctattaaatggacattgtaaatgaagagataaagagcctactgttaaggcaaaccaaatagaaaagattacaggcattataatatatattatatttgtaaataattttgaacattcctgataaggctaagaaatgttcatatatattgaacgtcaagcattatgaaactagcatttgaacacagtatactataggatatgttacataaataaagatttgtttttatatgagtttaacagaaagattttatttcctttctggctgttcagatttccattttaacaagccaatacttgtctggtagagtccacaattcttcgcacatttgcctgtgagatatccataagtatagtggcaccctaaaaagattggctatctctgaatgtatctatgaagaagcttgcaataaagtacatgagttaataatgaagattaaagaataaagtcgctgcaagagaagtgttattcacactaaactttgaaatgggagacctgcacaaatgacatgttaagtgcatggcttgctaagtaattaagaatacccatagtttggagctatgtgataaactagacaaacttctttactatacaagtctcattttagaaagcactcacaggtattcattatattctctggttctgtgcatagtcaatatcttacattataaacaaatgaaaataatttatataatgattggttattgtgaagattatagatataccagagattcaattcctggggaacgttaaatattagttatcctttcctatactatattctgtttcctctttgttttcacctttttccttatacacatgctgttcaatgacaacaacatgccactattataggactgatgaagattatagacattccaaacatgctccagtattgcaatttagacacatggctcacagactaatttcacagataatcctacttaaaatcactctgcatgacttaaacaggcctgtcttttgctctggcactttgtcattatgtggatgacaaacaaatgtttatccctcctttgaaattttaagctctaaatcccactctatagtagtatgacctggtgtccatatttctgtcctatccaaaaggaacatctgagagggtgtggctattctacctaggaatctctgagtaggacaagcagaaagtgaaaaaccaagtgaggacattattacaagggagctttggggaatgggggagctctcaaaatggaggctggaagagagcactagatcccctggaagtagagaccattgtgagctgtcatgtgggttccaggaatcagacctggaggacaacatatactcttaactgctgagccatctcaccagacctgtagttttcattttaaatattcgagtgcagcatgctagaggttagcattctggtgtctacactgagattgtgtttacaaatggaaaacatattgtggtgtaatatagtcaccatacattggaaaggccatagtggttattaaaataccttcaagtgaggttaggaaaaattcactgttgtagaaagaaatgtcaaaatttgtcaactgggaccaggccttcatttcaacataaatgtatgaaaatgggaatagagttataatatgttcctgtctcggaagcaatttgtctttgaacagacactcattaactacctgaaaaagtgtaaggggtttgcatttcagatgtaactcagtcagattactagctccaaaagtatacattacctatgtgagtttgggaacttactgaattattataaactactgtttcaaaagtgtaagaaccatatctgtctcatagactaatattgtcatcattcaggtagaggctattcataagtagtttcatttgtattaggaattataaacaaatacttccttgtcaggaattagataggcacagaaatagatattagagagatacacacgtgtgccatttctgagtttgagaccaactgtttatgtgaccacaagcaaattgtgtaactgggtgaggaataatatactgggtcaggaaaatatttgtaaatctcagtatataaataacttccattttaagccaaagtctgacattcatttttgttatgacattctagaatctcaacagttaatagctttccagaaatataatgaaacattaaaacatgatagcacatgaaatctgctatgttcatcatgatcaacgcataaaatttgttctgtattacagaaaagactattattgataagatagaaaacacacacacacacacacacacacacacacacacacacaccagccaaaattattaacatcagttgatttggagaacttctaataccatattcaaaggattccttacctcacttgacatcacaccatgatgcctctggctgaaactgctaaaaaatcaaaaacataaagtacaactttcaagaggaaaataacaggaaagaattagggatgcattcgataaagaatatacttttcttaattcaattggcctgttatttagatatattttttcaaaactgcactgaaagtggtcactgggaattacactttagcacttctgggtgtgattcacttgcagttctaaaggcacaggcacattaagacaaaatacaggtgccttctgttacataaaaactcaggagacttctagtttattgttgaactctgagggtataatttgacaaattagttttcccattccctaagctttacaactgagttcttaatcagtaaataaaattttcataccccatcattttgttcgctttcttaaaagcaacatcccgatgtgggttttaaatcaagacactttccctttcttcagagttaacagtagaaaagaacagcttctttagctagtctacacgactgtttggcatagttaatattaatgcaacatttaccttttgtgaatttatagattatgggaaagagctgtgcattatacctttctcccacagaatataataaactctaatgcaaatatcaatattctgatttgagctttacattaactattcttatatatcttctcacagagtccaccatttctaactaacagagaagacttcaagacaaatgcgtgaatttccgtaagtttgaagaaatccttgaaaaaggggaccagggagatcttctcaataatgaatggctataatcagagcaaatactaattgtattaagatattaaaatcaaattctaaaggagaacttgttctggatggattatgccattccaaaaatgtatttataaatgaaagcatatcagtttttgagaaatactttatctaaatgtttgtcccatttgtatctcaaaaacactattaaatataaaacaaacccaaggaggcataaggtgattatctctcagaattgggtttaaggaaatatatcatcaaagagagaatagaaaacattacagtttaggaagaacttatacaaagtcaaagcacatttttgtattatactttactttttctactattgaaagcacacctgcaaaatagtctttactcagcttagattagtggtcgctgaaagctatacaaagagatctggtggttttaattttattcatcatgtctctagctcagggacctggggaaatacagagaagtgtgctgcatatttataaggcctctgggacctttacaggcttccaaatgccttgtttgttgcaatctgcttgtcaaactattaaagaagtaaaatccacactctatcccctattgcatatgcagattttctctgttaattaaatcaaacctatatgattgcaaggagaactttggaaatccagtgtcttcccagcttctctaggagctagaagaaatacaatatttctagcaccatttacttagaaaaaaatgactatcgtgttaaaaaaatgtgttaaccttgattgattactcaaactgttcatttaaaacttcagatttagaaggtctgctattaaaaatgatttcatgtcattccttaattatagctactgtaatataattctaatttgatatggacttactcacctctcagatctaagaggttaaacactaaaaagcactaagagcttctttttaaaaaagtgatatttaagttaaaatattattacagtagtctatacttagttaagcatcagtttaagaaaagttatctatatatttgtgcctatgtgtttttgaacacaattataatgtaggcaaatactagtaaccacagaaactgcatccaagtcaaagggaaggctgacttgctgacctttcttcttgctggagacttaagccccagatgatttctttgtagtaagtctgtcacctgactagaaatagtggtgctagcttgagaagcatattcttctacttactctcagtagacccattcttcacatgctgtactggacagaaagaaagagtcactatccttttggatctggtatactatgtgagaataaccccatcagtggtaagaataaaaagtcataaacattagtcttcagaacatcagataattgtgtattttagaaataaggctgggtggatatttactatgaagtcaaagctcaaataaataagaaaatgtagttcatctcacttcggctttcatattacataatcaaaaatgacataagaaaagcaaaaataaagccacacagtgtgaaaaattagggaataaaaagtagtctaacagaagaaactaaaattcttgtgcaagtaatgtcaagactttgttccacgatctcatttagaccagttcatttctgctttatttccctttttcttttgtaacaacatggaatgagctcagaaaatcacaattcagagttcagagacactatagaaaccatcttgcacctcccttcatttcataaagggaaggatcaaagtcaagagagaactgtgtcacccagtaaaccccagagcatagacagaaacttcagatgcctaaaagcttgtcttgtgttcttaaaaactcagttgatttgcccagcaatccagtgccaagactaattactaaccataggggaagtgacaccatagtgatacattgcaaattggtgccagggaccaagccaattcaggaacatgtcctgaaaggtttgttttgtttttatttcattgaatggtaattcctagtcatatgaacaattgattattattcattaataaaaaagcaataagcaacatgcaacatgcaacagccttgttagaacctagctttgtggagtcagggccaggtagttttcagcccctatatcacaaagcttgaagcagtgtaggcctggaggaaccctgaactcagttgtgcagtgagtatgctgtgagatgacatgagactcttgaagaagatgcccactgtcctttgtattcaccccaaatgtggagctgttgtctgacagttaggtacacaagcttaaaagtgaattggaatgacaggagttgggcttctaacagttaggattgataagaagtgacctgagcatggagttgcatgaatataatctctggaacactgatacagtgaagatctctttactaaaaccttgagggcagccaggctctgacataagcccttgtaattggttattgagaaggatgaggcaggaggccaagcctgaacaatgtagtaaaaccaacaggggatgggcctgctagcaatgtactcagtagagtactattccagcacatgtggtgcctgtgattggaacactagtaaagggtgggttaaccaataaagcttttattatatctgaaaaaaagcaagtaaaagaattcttagcgtttgaaccactaagggctgtcacttagccaaaaggatatttcaagtcagatatctgaagatactacagagaattttgaatgctctcaacattaataaagttatgggaaagaaaagaaataagccatttatcatcaaaaggatgtggggaatagttattgacaagtgtcttagttttggcagaggggaccagacataccccagacttatcagaaagcatgccagttggagggtttgcctggatcaggctggcatatgagcatgtgagtgaggcattttcttgattagtaactgatgtaggagggtccagcccattttagccagtaccatccctaagcaggggtccctgcgtagtataaaaaagctagggaagcagagggtaggaggcaaggcagtaagcagcatcccttgtggtttctacttcaagctcctgttttggcttcccttaactgatggaatgcaatctgaaataaaccctttcttctccaagttggttttgatctgtatttcatcatcatcacagcaaacagagagaaaatgaggagaaatgaattggagaaagttccatactgtatgatttcaactatatggccttctgtaaaaggcaaatctatgggcacagtaaaatgatcagtagtggggctgagttgtaaagaatatatctagcatgtccaggattctgggtttgctcatcaaactcggaaagcacctccaaataaaataaaaggtcacagctgctaaggactgcagggaccacaacagcaatctattgaatgtacaagacaagaagtgcactgtaatgtaaactacagactttagttattaatacgatgtttgcaagtctattgaaaaaaaagagcaaaccaacctaatgcaaggtataccataaactcgtttcttctaatgatattaattctatttgccaatttttattgtctttcgtgcaagtttcatatagcattgacattgaaatggaaacagtatttagaagccctgagaagagaacagagctacacagaactcggagcactctccagttcaacttcacttttacagatgcagaatcagaactagaggaacaaatggattttcaaacgattgcccatctaggtttttgtgaggtcagaatacaccaagcgattctttaatggcagcattttttcctggaaaattaaaaattataacacacacacacactacccgaacacgaatattaactcaatgaaatgatcccatacaatcaaagactgtaatttacgtacttgtttctcagagcaatagaccaattagtccataataaatgcctccaaacctatatcacatatgcagaaatataccatctattatactattattggacatgtcttagaagtaccagggctcaaatacagctctaccattaaatagatattagaccttgggaattgtggtaaatgcttctgagcataggaaatcagagaatgcatttactaggaatggctactagcttgtattcaatataagttacattcttcataaatctgtcatttggatgacataattagtcattttcttcctaagttgcacaaatctgaaatactatatgaagaaatatattcagaacccaactcataaaaaagccattctatcatgaaactatacaatgattgacaagatagttatttccttcttttccataaacctacaaatgcaaggaacatatgttggtggagtaggggatgacaagtaagtcagttcacgttacagtatcattttgtattatttctggtctctttgaattattttcctgtcttcagtgatattttctacacccattaatttattacccatgaacttaattaaagtgttgtttactgatactccttacagatcattaatagaatgttaattaattatagcctagtactgtcagaatctcctacataatgaaggaacctctcccatcccattatatcttaggttgtattgtgaaatcacttcaatcaagttcttgcctaatacaataccaatttatttttaaacaacttaaaacttatgaaatataaatatttcctatcagtgctaattatcaggaaattaataaatgcatgatgctaagattttaccaaatgagagagtagaaagaataaccatctattcacaaatagacagaggaagtttttgaacataggcaggatattttatcagttattcatacacaatgaaaatacataagtatttcagacataaaatgttatgtaaatatctagatatagatatagatacatacacacagaaatatctcacgcatacaaagcaatgtctacgaaatgataacatttcagggttaaaatctgctctgaacttgcctgtgtgactttgtgatgcttcatacaaaagccacttgaatggttagggtacagattcagtagttttactgcattttcaactaggataacaatgtcagtcagaataattggcaccataggagcaccccatggtgataacctaaaaaatgcctctactgggctcatgtggtggcagacagtttctcagatgataacagcaagtcttttaaatagagttggggactgatcaatactataaagacatatacttctggctgatgtattaccttgctgtctttcaaatacttcattcagatatttctggggaaatcactagttctctattttttaacctggcaaacaaaactttaaagaaattttgcacacagaatagaacagtctttcttattgaattgaattcatgggggtatcacatgaacaatgacatgaagcacaccattaacgaatattatgctgtagtctttcaatcacttatccacttgctcaatcattcattcattcaaaaatttccatcgctctttaggttgtaaaaggactagggctaggcactgtgagaaatacaagggtcattagcagtctctgcacatggatttgcaatcctgtgctgcacctagcaagctggtgtttatttaaaacgtgacttaagtaagtacaggcaacagatctacccatcaatttgtatcttaaagataactgcagcatcctagctaacaataaaaaagcagagcacatgcatgattatagatatgaatatatatgaatctggtgctattcacactctctccaaattgtagcatctgctacattttgcacataataagtattcaatgaaataatgggatactctaattatccctttttattttttacctttttttgtatgaacattttgcctgcatttatgtctgcgtgaatcatatcatgtgcggatcatggaggccagaaaagggtttcgtattttcagatcccctggaagttacagagttgtgagacaccatataggtactggaaagtgaacctgggatccctggaagaacatccagtacacttaaactccaaaccatgtcccaggtctgccttctaactattctttttaaaataaatttattgattctaagtgtttttcacatcatgtatcttgattccattcattccccgtccctttgcatctgccctccacctctgtacccccaaaataaaacaatattcaagagaaaaaatgaaaataaaatgagaaaaataacaaaggggaaggaactataaacgttgccatggaagcatcagtgtgacccaacaagtcaccccatatactcctttgtatgtacatctctacttgccagtattcatcacaaacagtcattggtctggttcatggccccaaatccacctcatttatgatatgctagaacatgtgaagggacctgacctgcagaccctacactgcagggcctcagcaacacagggagttagtgtgatgtccagcaagagtcctagtgagggctcagaattgaacacgtagtagagaccaggggcctcaaagcagtccaattattcttaaattccactttcttttttatctgcatacccaaacaaatgggaaaggcaatgcagaattcaatgccaaagcacgggtaatttttttataacactctaaaagttatcatgtggaagaatgtataatctgagggatggcagcaaaccaggcacaggaccaatgagtgaatgttacaagggatggagatttgggtttacattcgaactttaataaatgtggttggtagttctagagatacttaggaccttttccattctcccattagtcaaaaatccgaataactacatgtcaggacatcagagaagggagtctagtagcagattcaaacagaggaatgcacttctgtgtcaatgggtgatgttaaagcattttggttaaggggttaattctagaccttcctaattcaaatcccagttctaccagcaaacggaagacccatggacaataagatcctctggacagcaatgttcacatcacgtaaaagaaacaattttcagactaataggattaaagagtctactgctgagaggttcttagcatatagaaaacaaaactacataaaggccaattaaataagtgatactggtgataaggtttgtgtttttgaagaaattccccacaagattgctttactctatttttcacctattctccaacttgagcatcaatttaatactcttccttctggatatttcatttgaactacttaccctatgaggagttctatcacaatcagtgtatacagggccctcccttatagtaaccctgaattccataaattaggcattttgttttgtcatcactctttgtcatttgtctgctagggctcaaaaccacaaatgttgttctacaatttccagttgccctacctagtactaacaatagggaaaagatggcatttcatgacattttatatttattgcattattatcaccctgtaaggctacagaaaataaacccctacatctttaggaaatttaattttttgaaactgtctcactgcagaacccaccaggcctgaaactatgtgagtcaagctagctttaaattcatggcaatcctttctccccaggcttccagagtgctaactgtagaggcaatgaaacacaacttgtagctctaattcctacaatgaaatctgaagagacctgagaaagaaatggtatatgactttcccaagatcacataattctaagaactagatacataactctaaactgtgtgttcttttccaatgggccacaccatttctgaagccattactccatgtgttgttaattcagtcattttcaggtggctgagatatggtataataccatagcaccatagcacagcatctgtgaaacagtgagtaaagatgtgtcttcatgagaacacgtcttaggaaaaaagcacatttgatgtaaattataattagttaagatagatcagtccacattgttttggaagtaggtagagcgtaaataataaataaaataaatgaaattctttgtaaatgaaattactcgagcatgtataatagcgcaattcaagggtcaatgatttgcttcattttacaaattaataacaaggggtgaagtagaagagttgctactcataacatagggagctgccaacaacagcactggaaaacacaaatttgccagaaatcagaacttgcatattttctgcttttaactcttcaattatggtaaactgccaggcctaaagtgcttaactttttcaggacacaatagtttatttggtagatggctctaaatgacacccaagggcctttaatttagtagttttattagagttggaagccataagggagcaaagagcttactttctttggttgtggagggtggcattttgaaacagatcttcccaggcagagaaacttcatggaggtcaacttcgggcagtgtgcttctacttaagtcttctaagccccatggtactaacatacaaaaggatagcaacagggttcaagttttctatgttatatgctatgcatatggagtacttactttatacaccaggaactatcttcttcaataagcaggaattgacacactgtgaggtttcgattccatttagtaaaatcaagtccttattttatttaatcattgcttctgagaaaaaggtttcagaaatattatttcagggccaaatttatttctagtatgagaaattaatgggatttcttagcagtgagacttggagatgagcatgttcttatttctaaagactgttactgttcattttaacgagggcacaaagtccccaaaagttatactaagactaaggacacgaaaaaggctgatggttagaggcttgttcttacaggtctttcatcataaagagagtaagttgcattttttcttttcttatagaaaaaaagacatgtttaatgaattaaaatattnnnnnnnnnnnnnnnnnnnnnnnnnnnnnnnnnnnngagcaacatttactgcaatatttaactcggattcagctgacgcaccccattacatttcatacacagcattcttattattgataactcggaaactgcagattcttaatgcgtacaagtcagatggaaccatcgataattggtgagttaatttataatacaaatcaactctacattctatctgagtggcagcatcctgtgtaagagaatcagttcctttgtatgtgcatgtttctggtgaaacacataaattcttggactgatagcagatattggaaagcttatttttgtaaattagctatactttgaaacctcaaaacaagaagtcttttctgtgccatggaatcttaactacagtaaaggacgtaagaaataagatctgctatacttcaggaaaccaagagaaatcacatttcatgtacactgtttcagctcaaagaattagcctgtcacaactgtcagatgcagcaaactgcagtaatttttctttaaagtaaagccgaaatggatttggcaattaaaagcatgtgctggtgaaagaaaatgcctaccaacaggaaaacataaaaggccgtatttataatcatatttttggttttatacttcaccgaaatgtgaatgctttatcaagataaaggatgggccctgtatttctttctaaattttcttttttctcactccacttagaaaaaaattgatcacggcagagaattgcatgagtgtagatgttatagggtatctagccaccaaagaaccattcgttcagatggagatagcatagcttgctttatatattagaaatctttgccagatgtcctggcaatgttccaacaaggatgatgacagtcattgcactaattctcaggaactgcacataaagataatactgtccaaattgagagtgaatgaaactcacactttcaaggtccattataaaaataaatgctgccaacagatcccagccagagaaaaaaatctagagaaaagaaatgaagaaaacagccagtatttgttctttccaagttgtagaaggatttttattttaatctagaggatatatgggtcaagtacacaagcagcaaggtgtatgaaaagagatacaggggaatgggaaatgcatatgcataaaattccacaaaatgcttgaaagaaatctttggaaataaaatattttaaaaaggaaaaaatatatagcattttattataaaatcctcagggcaaacactttaaagtattccacattagatctcaagcctggagcataatttttggttcataggtaaccaaataatattgtttgaaaagtgaacaaaagtcactgagaatgattcaacacgtgtgtgtgtgtgtgtgtgtgtgtgtgtgtgtgtgtgtgtgtnnnnnnnnnnnntgtgtgtgtgtgtgtgtgtgtgtatacatgtgtggcatcagaggtggaacccaggcaagcacattaccagagatgtacacaatcccccccacacacacagtttcattagaaaaacaaatgtttttttaaaaaataaaacaactagccttatttgttccattaggatcatgcttatttgtttttgtttggtttgttttaagcagtgcatttcaaggaactcacatattgaaagcagtgtgagacaacagaagtcacacacacacttagtgatgccacatggtttattcctaaatcctgactttttgaagttttcagacatggtcatattccttatcctgacctgcatgaatgtacacatacccacacagcagtcatacacatcctaattaaattaaatcttttaaaaaagtatcaataatgcaaatctcatcagtcttttatctcaaacctaattctatcaccaatcaaaacagttggcacactttaacaaattgaaaactcaaagccatgcccttgcaatctaaaaccaaatcttctggtattaaaaaagtcatcattttaataactaaactgcacacaggtagcagagttgatgtctctagtatgactaacccatgacaactgcatttcatttttatttggaaagactgatccagtgtttttatagtcctccattaagctgtttaaatcaaaaagtaaatgttgaaagaggaaaccattatagttaagctctatgtaaactagtactaggcaaatctcaggtggctacagagttcagtctggataaataactagatctatactaacctctttaactggaaaattccagctcctacagggttagtactgcttcaggttttccaacgaatctgacatagtttttcataaatacccacactcaatacagaggtaatagtaaaagcaacttggggtggagggagatgtcagtggactttctcaaacaaagaatgtcttcagtagttggctcaacttgagagatttagacctccaactttaaaattccactagaaatttaaatctagtaagaccatgaacaagaaactatatgcactggaacttctacttaatatctaactgttgagactcaaaactgccaaacattttaagtatctgcaacaagcagcagctagtgtctggttgttcagtgaagctttttccactaggtgctggtcatcgaaccaagaacctcagtcatgctaaacaataactgtaccccagacaggcctgtgactcctcctgcctctgtctccctagtggtttaaattataggagtgtaccactctgataaactggattaattcttatccatatttcacctctcagctcaaagattaacttcttggggagaaacctggttgatggaagtggctttctttatgaatttattctacattttctgccatacaggcatatgcatttgtctaatgtttatttcattcttcaataagttaatgactccagagtaaggatcacattgttgttgttcactactgtatgtcagcattgctggtgcagaattgctttctgcttagaatggagaaatccctgtgtgaatataaggaaacacaaaagtattctgtgttgattttggtgtgagagtcaaagatgcattggcaattgttttggtttgtaaaacacagtttatctgatggtttcattacagaacatttcagagtagacttgatagtatagttttcctaagctgtgcaagcaaagatagtcatagatgcattacactaaaaactataaggaaataggatatattgttgaaaggaatgagatattcttctgtttcttctgtccccaacacacaacacacacacacacacacacacacacacacacacacacacacacacacacacttgtgtatctgcaactttctaatactggaatagttctgacttacttggaccacctagttggcatgtggaaacaccacctcatagatggaaacagagaagaacagcaatgacaacctgacaaatatggatggaactctttagaccagtattctcaatcatttgaaacttagctgttactctctgctagtaaaaattgtcactctgctagtaaaagttgtcacttctcatagccacatggtcaacttgactttttgaacactttttttttttaattgacagaggctttgatgtgtttggactatacccttcccctagaagcttcttctaaatcttcactcaaaaggatcttcccctgctctgaactgttactacaaccatgtatatggcactatatagagagaaaaattctgtggatcaactaggtttcattactaagttgaatgaattgcctattggctatctgaatttattatgacattatcctatatattgttgactttgctttctaatgtaagatttggagaggaaatatgcatgtcatctttaagtttaactcaaatttcttatgctttgtacatgaggcatatgcaggcattacaagaataactaaatacatgtgtgcataagggaaatgaaatagagcagaaggcaaaatctatgtgtcaattatgtactaatctatgaatgcttatgcagattttttagatgacctaacatatgcctcatcatatagtacttcaatatgtttaaccaattcatcatttttaacaaactcaatgagtttaaactattaaacctcataaaatggggattccaagattgaacaaagctattgatatatttataagttgattgttcacttcaaatcttaaattctgagttcttcaatgtaattaagttgggaatgcaacacaccccatgcctgtggtgatgattaaacccagaacttcacatacattgggtcataacctcacacccccaaatcttttttaattgggagttgtaatgagctttggtttattcaactaacaactaatattaaatgaattgccaagtgtatcagaatcatattttgtgtgatctatgaggaatcataggaaaatatttttaactatgaccttaatatgtcactagagggcaaatcatgctttggctcattaaacaaaactacagtatgtcttactacgtgcctgatctgagaatccaagagaggatcacacaagtcaacatagtaaacatttctttcaggcagacaatatgccaataagcttagcattttatttcttcatcgaagtggtttaaaagtacaatatcctctgcttattaacacttcaccatttttaaaaatggcatataattaaactcacacactatgcttttagtctcatttgcacttaacttcgtgttaagctctgtcacagcctacagagtgctttgcagttgcttcacctgctccagttctgtggtatatagcatattgcaaggaactgctatagctacttaataaatatatgctgcttgattagtagaagcatggaaaagatgtatttttgaacttggagaatagttagtataccaaattcttaattatgtgtaacaaaggagatagttaattcagaacaaaagataattttcagtttcatttgtttttggaatgtatttccatacagagctgctcatttgagtctctcggttggtttgatagtatatttccagccatataaacaagtttcagtgttaattctcaactgtgctcaaagcttggatgctatataaccaacttaaaaaaatgtggtaaggaatatttaaaatggctattgtacttttacactacactgttaatattgattgtaaatttgatgctatttagagacaccaagtaggcaaggctataagcataccagtagagatcaccaagactgggataactagagtagaaagacccaccacaaatactggtgacctaataccaggggctagagtcctggactgaattaaaaagagaagagaagctgagcacaagtatccatctccttttttttcttgaatactggtttgataagaacatttgcctctgcattaacatccatgatgaactacatcctcaaaattgtgagtgaaaatgaacgcttctttccttaagttgtgtttatcannnnnnnnnnnnnnnnnnnnnnnnnnnnnnnnnnnnnnnnnnnnnnnnnnnnnnnnnntttttgctaccagttttacactgcacgatgtcttgaaagtagaaaacataatctcattttaaaggtacaatagaatttagaatattatttttcatatagaagagaaaactaatcaaattcaaatagttgacacttttttactaaagggaatgggtagagattattttaagactgaagatctggacaccatatgaatatcttgcttcttccatgcattttctacattcggaggaatgcacctttttttcttttggattattgtaaaataggaaaaagcaaactcagaatttatttttttaaaaaatgaataaaacataactagaatgaggtctgacagcccagcatggttgcatttttctgtaattttaacatttgacaggtagagaaaggggggggggtcagcctgtaagacacaagagagtgtctcaaaacaaaacaaaacaaaacaaaacaaaaactgccacaaacaacccccaagaccttgactccaaacaattccttaaggaaaataatttatttctcattaataagattatagggaagaatgataaatggcatttctaaacaaattttcaattttaaaaagcatcatttaaagtctcattgattaatttatgtttgttttgtgtatatgtctgtgtaagaatatacgtacatgtatatgcaggtgcatacatttgaagtgtatagagaccagatgatggggtcaactgtctatttgtttggagggatgatctttgcctgatatagggacttgttttttttttttttttttttttttactaggatggcaagannnnnnnnnnnnnnnnntttccaattgtgttcaaaatataaatagatgctttatgttctgggtcaggcccatgacaaatgaatctaggtatctgctcagcaacattaattgtatagttccagttcttcctctaactgctgacctctagaaagcttgcctaaaatcctattcaaattttcactgtttatccactcgtacccttaaatcagtaactaatatgtaatcttcacaagttctgaaacattctatatacagttcaccaagccaaccagcaggaaagcagagcaagcggacacagtagcgagaagacagctttcccatgtgtgtccccgactcttaagctacactcacaccatcctgtccacaccctatggagcctggccaggtatacttgcagcgagacccaggaggcatggtcagggtgacccacatatatgtacacacacacacacacatataatatatatatatatgcatttgcacaatgtaataacttatcttcttatttttgcaataaaacagtgtcagtactaaatatattcccttgcttcttacatttgtatttaaacttttacttatttgtatgtgtgcatatgtgtgtatgatgtgtgtgtgcacacacagaagtcagagatgtcaggtatcttgctctatgactctccaccttatcccttgaggcagaacctttgagccagaagctacactgctggccagaaatccccagtgattctactgtatccatcgggcacagtgctagggttagaggtgtacatggttatatatgggcttttacacgggttctggaatttcaactcaggtcctaatgattctatagcaagagtacttatccactaagccatattcccagctgaaatttatttaactaagtattttattagttctttgagacttttatatcatgatcatattcaccccaactcttctccttaactcttcccatatccactcttactttcttatccataacttaatgtattcttggtttaaaatgtaaggaaaccaaccattttaaaagtctctctctctctctctctctctctctctctctctctctctctctctctctctctctttaattggagtaattctacacagacatttttttccttagaagccatagaatgccaaataaaaagcccagttacagttgtgggatatctgctttcaagttattgattaggggtatcccaaagaaagtcctcaaacaagataggcaattcttattgttcttgcttatctaacagataacttgtcagcaaaacctgatagctgaagatagcacacacattggtcaatggacaggtagaaatcaagttgtttctgatcaggaggctttcttcctgctggctagatttcacaatcattgaaggtgctatttaagcaggatacaaaatctgtgaattgcaataatgaccagcatggcaagatatgaccatgtgtgcaatagtggcacaaatattactagggcagccaactgctctggggttatatttaatgtcatttgttttttaatcatcacctaataagatgaatttactacctgtgtcataaagtttaagataaaagaaaataacagagagtattcaacaaaaactttaatttgccatacattacctaaggtatatcaggaaatgatacaccaataactgaacagttgtttcctatggggaaacatactgatttgtctttttacaatacaaaagtagtatatgtctgagagttttctgtaagagtatatataaatagatatacgaatattactattattacccataaaactgtgtatttaacttaacacaaatgtcatcaataattgatattttagtcattttaaattaatgtcaaactaaaattttcctatatctcctattatatccaacttattttgtaaatataaaaatggctcatctttgtgtctatgaatagatatgtgcatactttaatacatgtaaattatatacataaaatagccaatttagagtatttttacaagctctttctattatttccacttaatattaatgaatcctatagacaagtttttaatctcttaaaatgtagcttctgacgggaagaatgatgagaaattggcaggttgagggaacattaactctttcagacaaatcaagacccatttcatgttctggaaaatatgatttcccagacaagtctcctgtggcttgaaagggtttatgtatcctttaaccagtgatacattctcttttttgccattactatcatgccccaaatgtctatcaaattccctggacaatctttgaataatggagttcatgcccagtgtaatttcagcaaggctcatcaaacagataagtcttgagcatacggctcaagcataggctccattcgaagagttccttagacagcaattttaatagacatgttggctaagacataattattaatacaggcacattaaaaacaaaacatagtaaatctaacattagataggtaatagggtcatttctttggataaactggggccattctataataacaacctaatgttctctattttcttgcctgaacgtaaagtttcatatctttatacactgaactataatatattttacaaaacaaaacaaaaacatttatgaagcacttacctttctagaaaacatcacgccagacttgttgccaaatacttaatgatgaaaaggatgcacatcttaaaggtgcttatgagccggtgtgcaaaactggcatgtacataaacaagagtacaggcaaatgagtaagcaagatcatcaaagtattaaaatattatgagaacacaagggacaaggaaattaattttgattgctatgattaggaagggctttctggaggagatggtgtaagtgagcagctaatttttaaattagtttaccatcttttcaaaaagaacatttttcccacttgagagagactgcaagaaggcaataaaacagtttcacagggaatacatgtggaattcatctcggatttatgaacctctctgaactcaagggtggtgtaacatcatggttagaaacatgtgtcttgatatctgaaagaccaaaatttggatcaaaatcctcattaccatatgttaccacttctatgattcaactgcatggttgatcccttctagtcttctcatatttaaacgagtttaattaaaagaagcctaataatagtacttcacttacaggatttgccttggcgattgcttaaggctggcataactgtataacacacacgcacacacacacacacacacacacacacacacacacacacacacaaagagagagggggaaggggggaaggagaataatcatttctactctaaaaatctgaatgaaaaaaaaaaagaagtgctacagaatcagaatcactttgagcattgacatgatgctgcaggccacagataagatatcctattacaggtaggaactgaagaatacaggaagaacctggaggccaggtctgctttgatatgttaaataggcacatccaacaggtttgaaaattaataaccccnnnnnnnnnnnnnnnnnnnnnnnnnnnnnnnnnnnnncccaaagtgtctttatttgaaaagaagcaatgatcaactattttggattttggaaacaattttcttttcaatgtaaacattatatccatgggtctccccctctacccttaaaagaaataaaaattccatactccttcctatccaagccgttaaatgagacaaaaggattattttgaatttcctaactttttaagtttggagaccagtaaggcataaagggtaaggacagagtcagatgtggtaacactttctacaacatagcctgaaattctcagtttttctgtgaaagacagcaaatgtctccggctacaacattcgttagaaaagaggaaagagagggagggaaaaagtcgtgttctttgtttttgttttgtcaattccatatgacattttctttaaaaagaatggcttgtcatcccactgaaagctattcttggcttgtgctgaaaagctatgatgtgatacctctggctgaatagtatcaaaattttcatctatttaaatatattctgattgaggatagtgtaataaaaattaacataacggcagtgctgtggtgaccccaaatctgttctgaattgtctggaaagggcaatgtgcttcctgaataacttgatttgtaagtacttcaaatgactctccctcacactatgaggaaatcccaggtgttgatagttagttgacagggtgttaatgtcattaacattctgtcagctcttcttgtcaatgtgttaatggtgctcctgctgctcagtcactctctgtcctccagttggggaaatgatttagttagcagtcaatcaaaaagctaagctgattttgggccagagacagccttgccattgacaaaaatctctgtgagtaaatgtggtaagaaatttgtcaacagaatataagcagtaaggtcaacactgtgattaatgtgctttgttagacagtttgagatgttacagatggaccacagcacacacttaaaaggagaagaaagaagggcatggtagtgcacagctttaatcctcaacacaccagagacataggcaggccagtctctgagtagaaggtcagcctggtccatggagggaggttcaggcaggacagggttacaaagtcagccaccgtctcaaaaaacaaaatggacaaaaaaaatcaacaacaaaaaaaaagcagtttgactaaaattacaaacagctctctttaagagtgagtttctttactgtctggaaaagccagatacagtaactaaagtaatccctttcatgagagcctgagaaggaannnnnnnnnnnnnnnnnnnnnnnnnnnnnnnnnnnnnnnggtgggcaagaagcatgtagcaggtctcaagacacattagtacaaagcaggatgctttagcaaaccattgtgagctgaaggaaaacaggaaagccacagaaacaaggtcttttagactttctcctgactttccccagggaaacccatcagtgaaagtaaagtttacctccctcaacccctaaaatcaaggaaggttactagcttttgccttcaacacaggtgaaagttgtctgtcttgcttcatggtgtatggtgagtgggggctggcacacagtaacacacagaagaatcttgttgaatcctgctgagccttccctccctccacattattaacagtccataccacttttatctgtagtgatatattatttatgatttgacaaaacttgcctgagggttcagaatgcaaagccagtcgcaagccatagaggccaggcagctgtggtacagatctttaatcccaggacttgggaggtggaggcagatggatattggtgagtcgaagaccaccctgggctacacaagagtgaatcagtttaaaagagtaacagagttcatgcctttaatcccagcaatagagaggtggaaacatgagtgatacagttgtgtggagaaaggaaaataagatgtgaggtgacaggaactgaaggtatttgcctcagaagaaacatagagagcattgcactatgaggattcgtgggacagaattacccattttggcctgaggtaaaggtaaggctgctttgcttttctgattttcagcttgaaccccgatacccatctcaggattttcattacttgtgttacatttttctctaggactagatacttcttttatcagacaaaatgcaaatggacatttcctctggagccttcatgtctggaaggctcctttgacacatagagcagttaaacagatttctcatgttcttctcttgttaacctgcctttggttacaagtgatgtcaaccatcaatcatatcacaggtaagcaaagattattaggttttcttttctaaacacagaaacaaaaacaaacaaattacccaagtctttcacaattacagtgttggccaaggttgcaatgttacacataatattaatgacagggctcttagaagaaaaggccaagatggcaaggaattcattctaatagcactgtctcatatctttcaagtaagggttacttttcaaagaacagttagcaggatatgattctgaacctcagctcaccaatttccccaatagacctcaaatacagacacagaactcgtggtaattttaaaagatgaagagagatgacctttgaaatgaattaagaatgtgggactatggaaagtatctttatgagttattgaagttatcagtagagataaaagctattcctctcttaataaataggagctttacaaaatatcaactatataaaattaggtcatttgacaaatagtaaacagtcaatcaatgaaagttaattataacattaattattaatgggtttccgtccccaatcaagaagctatcttcaattggtacctgattaccaaagaaaatttattttctccaatgtcatttcactgggtatattaaccctacctacttcaggggccaacacaaaacaaactcaaaggtatttttatacaccttttgtctcatgttgctttgtccagcatttttgtcttactagtattttgcttgtataatttggttttcaatattgtggatttgtgtgtgtgtgtgtgtgtgtgtgtgtgtgtgtgtgtgtgtgtgtgtgtgtgtggagtgtgtgtgtgtgcatgtttgtgtctattgtaatttgaagacagagagaaagggtatggatttgcttggttagtgaggtagagaggatctggcaagagttgggggaagggaaaagactgagtaggatatattggatgaaataattgtttaccaataaaaaataacagcaaaaaacccaacagcaaaaacctcaaaagcaaccaaccaaccaaccaaacaaacaaaaaaaccaaaattccactattcaatgattaaaaaaaaagaaaaagagaaatatagataaaatcctagcaagctatttcttttaatttagtctcaggactagatagatgtacagcttggtagtaaaggacttgcttaacatgcacccagattagagctacatccctagttatctcaagaacacaaaaactaccaccaataaacttccaagactaggtttgtgatgagcatgttagcattgaagaataaatatttcccggactatggtcttttaattttatggttatataaaaatgtgtatgctgttccagacccctgaaagaggctgtcagtttggagatctggttaatctatggagtctctggtagtggatcagtatttatccctagtacacgaatggacattgggagtccattccacatagagggatactctctcagcctagacacacaggggagggtctaggccctgctccaaaagatatgatagactttgaagatcccccatgaaaggcctcaccctccctgggaagcagaaaggggatggggtaggggggcattgagggacaggggaggaggggagggagagggaactgggattgacatgtaaaacaagcttgtttctaatttaaattaaaaatttacaaaaaatgtgtatgcttaatctatttttctcttttggagactcatgcaatttaggctggccttgattttcagatcaaccttcctccaccttccaagtgccaggattacagacatgaatgccatgcatggctctatgttttataatcagataaaattaatttcatttttttcctctcagttttggcatgtagaatattctacttccaaatgtggtatctttaagttatttttgtcttctatatgaaaatatctgagataatagctctggaggctgagaatccaggatgaaggcaccaggaaattgatatctagtggtaattgattgtgccttattgttgtgtcctcctatggcagaggccccaaagagcaaactggcgtgtgtgtgtgtgtgtgtgtgtgtgtgtgtgtgtgtgtgtgtgcttgtctatgtactacatgcatgcagtgccctcagggccagatctgagatctatttgttctctattgttttttttctgatttttttatttgaattagaaacaagattgttttacatggcaatccaaattcccttctccctcccattctcccctaccagcccccccccaactaaatccctacctatcatatatcctttctgctccccctggatgatgaggccttccttagggtgccaccaaagtctgtgataatctttgggatagggcctaggcccacccccgtgtgttttgactcagggggtattcctgtatgtggaatgggattccaaagtccacacctatgctagggataagtactgaacttctataggaggtcttgtagatttccaaggtttcctcaatgaaatccatgttcctggtgtctggatcagtcccatactggtatcccagctatcagtctggggagcaagagttccctgatattcaggtcagttgtttctgtgggtttcaccagctttgtctggactcctttgttctttactcgtccttgtctgcatctgaattccagttcagttcagtgatgagttgtgagtgtcgcttctactgccacccgctgctggataagggctatcgggtggcatataagtcagtcatcgatctcattataaggggagggaaattaaggtagcctctcctctgttgcttagattgttagctggtgtcatctttgtagatttccagacatttccctagtgcctgatttctctgtaaacttaaaatgtctccatctattatggtatctccattcttgttatcttctattcttcccctgactcaacctttctgctccctcttgtcctctgcatccctcctcttcttcccctctcattctcctagctcccttcggcccctcttcccgtgctctcaatttgctcaggggatcttgacccttttcccttttccaggggatcatgtattgtttttataaggaacaaatttcacacatcaaagaagagttgttattcttatatcttatcaatcacttccaaaattcaccactgctttatacacagcagatgatgtgtcaaaagaaactatggattgggcacaaatattcaggccatagcaggaggaataatgagtgttataaaccgaaggagactgaggtaaactcagaaggcagaacctgctgaagtaggtcacaaaaactataattgcctaactcttcatctcaggagcaggccataaagaagctacaaagatcattctccttgtcttccctagtcctcagacatgtgacctgttccctgccctctactcagagaggtaaggaatgtcatgtggagaacctaagaggtatctgaacaaacatcttgctaaatcatctctcacccctctaattgattacagttggattacatcctttcttcttcgatttggacttctatgtaaaaaaatctataaaaaaaaagccctccttgccttttctttctgagggctacctcctatagcaggtaacacatttatcaactttatagctcctttcttaatctgtcttttaataggcatgttaagccatgcattgtgcaatgggtacagaaagagatttttttctaccctacactattttttctgactcagaaacaaaaaaaaaaattagacagaaaaggagaaacaaaagtgacatactttgttataaagctgctggcttcaagaagctagaagtagggtaactacattcacaggagaacactccttttaattttttgagacaatgcattacaatgtagctcaggttggactggaatttatggtaatcctcctgctactgccctaaaaccattgcgatttcaagcttgaatcaccatattggtaccttgaggactatctacttttctaccttaaaaaaataaaacaattactttagaatgtatggatcataaattctaaaattgatcatactttttaaaaatgtcaaacctaaaacaatgattcaatattacttaaatacttgacaaaatttatatggataatctttcagaaataattataaggaaagattactacttcttaacaatatccttctatatggagaaagtcaaataaggggcttggattccctaattcccaatgatgttacacagatttgctgagtgtctacattgtggtaggtggtagttaattgatagctacatagaggttaacaaatctgatataatctttgctaaagaacagtatatagagagtatgtaaatgctaagctgccatcagattatggttgagttctcagttgtgtgcactgtagtaatttaatggcctgacaatatctaggtataataagcattgaattaatgttgtgaaagagtaagggtacacatgagaactgtttgtcataacctgacctggtcatctagtgaagattcaacctatatgttcagtaaccatcatgccattgctgttatccatagtgctcttgatatttatggaggtcatagacatggaagtgctgttcctgaccggttttgtaactccaagttcttacagatagattatagttggttagataaagtactgtcatatttacttaatttaaagcatcagtgatctgaaacaaaactattggcagatgaaggaagcatctagagtcctgtatgacacatgggaacatagtattcattgtaaaacagaggccagaggccagaaatatggctaagtgatgaagacaaattccacaggacccaagtttggttctaatctcccctgtcagccatgtttttcaactctttgttcactagccaaaaggtattaaaaatatccaaaatacagcatacatgtggtcattttgcattttgcattcgtctttctaggagagtgaaattctcactaagcactcgtggagatttttcagaacaatactaatttaaacaataatttcattattctaatttattaatttatagttttaacagaataatattctatttttctgtaatgaattgtcatatttttcttggtatgaactgcaaagtcacactcctatacaattccatacactttctaatccccttgtagatagtcacactttggtaccacttaaatgaagaacatttcatttaaaaatgattaattacctgcataaaaagagaaataaagtagggagaacaggtgaagttcatgagggtttgaaattagtttttttttctttcttttctttctacatgagccgcaaagactcaatgttgcaagctgttgtgtggccataagccaagtgtaaaagaaaatattccatgacaagagtcaacatgaaaaggtgaaaaaaataagtcaagtcaccaatgaagtgaaaggttcatattaggtgtctcaatgtgtccagttataaaatccaaggatagacaaggactgcctgcttgcaatgcctcacaaacttgttcttccaatattcctgtttacaaatgtaacatcactaaagtactatatagcattattttatgaggcaaaaaaactaagagtggaagacattttatataaatatcaagtactggtcttaagtaattcttaggttcagtgtcataatgtctaagttgggtaggaaagaaacacatgaggagaaaaaggcgataggtttaaccttggaagaaggtgacttccatacagttgttgaaggaatttacttattatctgataaagaaattgcactatttattccctctagagatataaactagtgaatcaatctgcagttcaagatacttatttaaacccagaggaggaggatatggcttttacttccgaaaacccagaatagaaaaaaaaatcagttctgaatgtagtttatcttcagacaacagcttggacattaacacaattcaaaacaaatgtagtttctcataatctcctttcaaatgcgcatagacacacacacacacacacacacacacacacacacacagagtttatcagtatattatatgcaaaatgagtttcctaaatgtttatgtagcaagaaatatttacttttctttatacatcagctacttaccaatttgtttctctttccattcatatatctacacatttatatttcagtctactgacattacatattctctcattgcttctcaaaatgcatttataccctcagaaaatgcacatgaatatacccaaagaaagaaaattataacacttcctccccgaatcattttcttatattgactctatccttaagcatttggttataaaagaggattatttgctttgttctttcaggtatgatcagacttcctaagacttaccttgcatatcttgtgggctttcaaataaaatttatctttgagaaatggcaacttttctgtctaattgttcccttgcttacattaccaggttcaaacatcgtgaaatgaaatttatgctgctaatataaaagcaccttacacacaaattcatctaatggtgtaggctagtgagtctagaatagatgaacagatagctacacagaaaaacacacaaacaaattcttaaataaaggatatcgtcatcttttccacaaacttatcgtgttgactgtcttcttttgggaaattcttgatgtcacgctccagatgaagaatgttttgttccattgctacaaggttgctcttgagagtttgagctgaaactacagaacaatgtgcaaaatatttagaatctttcactgggtattacacaaaataaccaaaaacagtatctactgaatatttttttaatgtggaaaattgttccatggagtcattttcacatttttctcaattacagctcttaaaaattcaactctctatgaattaaatgaaaatgtgtaatgtaatataccaaaatcatcatatttaatatgggaatgtcatcgttttactcagccattagttcagatgaacccattcctatttaaatttattgatgaacacctaatatttcattctttaaaatctaaattgaagattaaagagaaactaaggttcaaagagatcttatattattaatgcatgtccttggttatataaatgatgagaggttaaattatataaaaggataaaatgtttgcttttttttgaaaaccctgagttttatgaaccaacaactatggtacaaattcccatctttaagatttcatactcaatagagtcatgtaaaataactgttgctacagatgttgagtttagaacaaaccctagtgaatataatatgaacctacaaatatatacacacaaagcttcagcatgtcttcagacacaatcattagctgtttaattacccctaatactctctgctcttctccttttctctcattgacaactaataatttaaagtgttgtatcaaaactgctcctaaatacatgtacactttcaagatctctcatggtgctgtcattcctggggtgtgttaaaaaaataagaaagaaaaaaaaaccttattactattttctactacattattatatgactttgaattgcatacacagacacttctatcaataccaacagaatcagatgaaattccagttgaggagacaagggaagggttacactggtttttaaatccatatttctgaaacagtgttttcattaaggactatgaaacacaaatagaaaaacacagtttctatttcggtgaattttatctattttagagatatactagcatcacaatgaaaaatttaagagactgactaaatcaaccctctggcaaatttcagtcagattattctgatccaaattcatcaccctgacaagcttacctttataattcaacaaggagaaatcaacttaatatacatggaagttcaagagactgaaaatcaaatactaacactgaagattattttttctattaatctgtcagtataaatggccctgtccaatacagttccatttgtttagatctgacaagctggaaagtattctttattggagaaattggagaactactgttctgccttgcaaaacctttgctaatgctgcagcaattactgctcttaaaggatgagtttacttcgaagcaaatcattctgattttaaaactgaatttttatcatttgttttctttctctgtggtctcccgaactattcaaaatgtttctcttttcccatcctaaatgatgactggaaaaacaaaagatgtaaaattgactggttgttgagtcacttgggttacaagaagatagggtgtgtgtgtgtgtgtgtgtgtgtgtgtgtgtgtgtgtgtgtacataccaaaggattgtttttaaaatgtgatataggcctccactcacaatgtactacactgaacatagacatatttcttcttcctcatttcacatttatttccatttctccattcttcaccaaatcaactacaacgcaatgatgaggcttgggatattttcgtaagaaagctcccatgccataaaaaatcagaataaatttacaaaattttcttaacctgttttcttactgaatttttagtaaaaaatattttcagaagtgcccttaccaattttacatgtcagattttcaattctacaaaaatttgttcagatttgttctctaaattctctacaatttcattgtcaccttctatattgctccttaatttgtcttatgattttattaaatcttgagctgtggctggggttcagaactaatatttctggcatgctgagtattttggcgtcaggagattgaaaggcctaagaaacaaccactctttgatctcctattctgacatcttcagttactgaatctaactttcctctttctaatgcagcttgcccatagaatgtagaattcttcttcccccaaacaggtcacggtatctagaaaggtccctctcttttctcctgaagattttcatttgagaagagtgatacttcacacgtgggaggaaggattgttacacaaatcgcctatcagattctttgaaagtcctgatacattgcccctgccattctattagtatcagattgtccaaatgacacctctacacagctctttatttttgaaggttcccatgtcttacacatgtattaattatactagccatactttcatgctcatttatataaataaaatggtagcatatgctacatatgataatcatgtagtatatcaactattatgcagttagtatatcaactattatgcagctataaaaaagtgcaggattgaaacctttctataaatacacataagatggaaggatgcaggactaaacatagacaatgggaaattatggaaaaggtcaaaggatgaaaaataatagaaacctttattagttcctctgtactacatttgtaatgaattattaatattgtaactgaatataagggtaaaatacttgagacataataacctaattctaccttacatgcaaatgcaagcatttgtagcattacacatttttctttacactgggggaaatcattttgactttgacttagcagtgatattaaagggaaatcggaaaaaggtagtttacaaagtcgaagtccccgagaaacagagcttatgatacagtttgcttattagtattttattgaggtatttattagcatttttggaagtgagagtataaaaggaaaaaagaaaatagtacagggttaagttactgaactggccatagctttacaactacagttcactgcctagtgtctcaacatcattccattactcatttcatgagcatgaaacctatacacatcacttggggttcccatgcttaaaggatcactggatttgtttaatgttttcacattactactttggaaaataattttttagttccaggctacattgccattttcaccttgggttttacaaattatatggttactctttacctccatagcaaacaaaagtatgttagaagagttgacttgagggaatacccatttcacctacctgctggcttctttcaacaaatgtttccaggggcattaataaaccaatttggcctggctttggagttatgtgtgcatgtatgttaccaaaagggtacctaggaaatctaggatatatacatactggatccataacacagtattctttacaacctaagtggcttggttagtttgggatatttttgacaatttatatcattcattttgaataaataaacaaattcagcatacttaaactcttacccattagtcttaaatctgttttgtagaaacagtaatcaagtctacacttgatttttcaggaaaagtattggttacatattctcaatctagttaagctataacttgtttcttcaactagtcttcttatggtattaactttcttgtattttccatcctccttatggtattaaattccttgtatattccattcttctcccctctattgctcacctcccagcataaaacttctactgtatacatgctgctaagaatgaaatagtgtagtccaaatctaagaaaataaggagacacctcccttacctcttatccctactgtgctctgattgaatttattagtagtatgctttctaatcaagggaactaaacgtaatctgcgttttttggtacatagacttcacaagatacatggattttagatctgggaagcaatgataattatatcaaggaataatcagtttgttagaaatatagggaagttcaaatttaaagagaatctttggagactaaaccatgtacaatagtccctaggtacatttaaaagatattttgtcttcctagaattttataaagatgttgaacagatacaaaagtgttgaaaaaacaatgatcatggacttatctgctggattacttgccaggaacacactgctgtaatcttaaaaattaatagctggagtcaatgacatagctcaatggggaaaatgtatgccacacatgcttgacaatctgagttcaattcctgcaagccacataaaaagccagatgagaaagcaagaatcccacatcagattgtaatccccacaatacccatggcaagacaggagaatcattcagaagtctgcacacaatataagccagaagtctgcaagtaagataagcctgaagaaggctgcaaagcaacagaaataggagactgcttccaacaaggtggaaacaggaaacctattcccataagtcatcgtctccatggacacatgtacaacacacacacacacacacacacacacacacacacacacaaagagatgaaactttctaaataatgatttggtgggggaaaaaatcttgtatcctaaaaaacagtaatgagtatttatgtagcaccaagcctacctaaaaagagaaggcgggagggggggtgactttcactgttgctgacagtacctggtgctccaaaatatttaagcactgcagatggttaggaatgcttgtctactgaatggcctcaggctgaggttgtatttttgggcctgtcattatattagtccactaatataaattaaggagtcttttatgacagtgcaacattttctatacaagtaaattcccagcacagacatttttaatgactgattagtcagtctggtggcacttcatttttttctcatttcatttttacatctgctattgaattactgaatctgaattataacactaaaaattaaattatagctatctggttctttcttatagctttctttcatgtactccataaatatccttttaagcgtatatactctcttgagttatgcataggagaaactttccttacaaatcttatttatctgctagcttctgttgaaaaatatatgtatgtgttttcttggcttcaagcaaatatatgatagtggcctgattttttagtcaaattattttaatttattactttaagacaagctaagtataaacaatattttaagtgagaaaatggatggaaagactcttcaattactttctatataatagaactaagaggtatttaaggaaataaaatcagtatgctggtgacattctgtagattgtatttataatgtacaattttatgtaaacataaaagttttacacaggaacttggtttttctccctcttctttaacgttttccatcacttttaaacactgacagagtaacagaactgttcttacatttgagcccaaagaaaggtcacgtaaaaacttcctcgtgtaagactctaagtgatcagtctcaaatatgactacaatccttctctaattttctgtaacttaatacattcagttgaattactatcagctgagacacaggccattaaaatgtttcagccagaaagcacgtgtgagaaagagacattaaaagcactctgaagaatgggcattgttgtattctttatcaaatgcatttataggctaatagtgtcactttatatgaatgctatacatggaaatggagtgaatgtgttttatataatatcaaaggcacaatctcatcagcatgggcttctttggactttcaggaaaataaatgggaaatgggacctagatttgaaattcctaaccctaccacccccaaaagaaaatgttaaaagtcacacatacttaggagaaaatttttgtttaaaaacttaaaagaacattcaacttagctacccatctttaacattctttcttctattatgggatttggcagggtactgctatatagtcaacacttgtttgaaactcactctgcaaatttcccagctgtgattacacatgcatgccagtttaagtagcattctttcttttttccctccattttttatttaaattagaaacaagattattttacatgtcaatcccagttccctctgcctccccttctcccctgcccacccctagggataagtactgatctactacaaaaggccccgtagatttctgaggtctcctcactgacacccacattcatggggtctggatcagtcccatgctgatatcccagctatcagtctggggaacaagagctccccgttgttcaggtcagctgtttctgtggatttcaccagcctggtctgaacccttttctcatcactcctccttctctgcaactggattccatttcagttcagtgtttagctgtgggtgtctgcttccacttccaccagctgctgggtgaaggctatactatggcatatgtattagtcatcaatctcattatcaggggagggcatttaaggtagcctttcctctgctgctcagattgttagttggtatcatcgctgtagatctacagacatttccctagcgcctgatttctctttaaacctataatggctccctgtattatggtatctcttatctagctctcctctattcttcccctaactcaaacttcctgctccctcatgtcttcttcacccctcctcttctccccttctcattctcctagctccctcttccctcatgctcccaatttgctcaggagatcttgtccttttccccttctctggggaactatgcgtgtttctcttacagtcctccctgtttccctagcttctctggtcgtgtggattgtgggctggaatagagacaataaggaaaagtagccttctttctaactgtaattaaagcctatgtgttccctccacatgttcacatttccctatatcttgtccccttaaacacaaggcagttttctaaactgaattcacaatgtggtctgaactgaaactgaaagggaaggaacagcagtaactaaacacaaaaattatgacatcgtttgccttttaaaaattcagcaaaggcatttcagcttctggtatcatatgtctgttgagattcgaggcatgaaatcctcaatctgaacacattatttttaaataaagaaatgagactctgactagagaaaagaaagaaaatttaccaataaccagtgtaaggtctgactaaaaggttagctgtattgaggaggaaggagaaaagagatgaaactttctaaataatgatttggtgggggaaaaaatcttgtatcctaactacaaaatcaacagcagtggacagctgcccgtgaagaatcacactcccttcacctgctgtctcccctgcaactgttattctgcctacagcaaatactatgtgtgaattttcaaatcaaaggtgaaaaccaaattgaaatctccagcttttacagacagtcttagctcaaggataggattgagaagtacacagtgagctgaaactcttctaaagtaatgctggacagagtctcattggaatcatttgctctccttattagaaaaagaaacttcattacagaagaaggttttcattaaataccagcagtcaagaagcaggaaagaagggactgaagttattctgcatgtgctatgtatttaaacctgatttcaaagaaagaaaagaaatgagagggaaaaaaaactatcattttctttacaaaaataaaacaattttggaccaccaacatgtcaactcttctatatagagtcaatttcaatgctgtaaatgctattctcattttttgttgtttttgtttttctatttttgagacaaggtctattacgtagtcttggctgtcctggaacctgccatgtagaccagagattcgccgccctctggctccagaatgcttcgattaaaggtatgtgacaccatgaccagtttgctattctcaattttttgcttattttgtttgattaagaaaaattgtaactaatattaaaatatagttttcacattcattttctttacagctgtagagtatatcagtggataagcccatttccaattataagactatcattataatgaataggtttgagttcgggtgacttaggacttgtaaaaaataaatttgacacatcctcaccttgcaaattaaccctcaaggtgtaagagttgtcagagtcatggacattgacaagatcaaatcacatattctaaaatagaccaacatatataaaaatgctaatggtataaagacacatggaaggatataaccacaagtagaatatatacattctctcatgcgtttatttttaacatttcttttatttgggtgagtctaatataattacataatttctccagtccttttcctccatttaatcagctattttcaatttttataaaatctttggcagtgttatgtagcaattcccttctagaaaattcttccatctttgagtgaagcttctgaagacacaagatgttctaaatggaggagaaacatttcattctgcagggtgaacttgttaagctcagggagtaaagaactccaatggttcaggaagttcctgaaactgacaagacttactaggctcttccctatccacacacatataggcagtaagggtcactcagaaactctcaaaacagctcagtcacctaaaagagagacaaattgagctgcctagcaggatatcagacaagctgacctgcttagaaggggctcagagcagttgagctacctggatgagacatgctccaacctgttgaggtgaattggacagtgagcccaaggtttcctgcattcataagctgtcacctatgctggagtgggtttgatgatacagctgtctatgagtcgtttctgctcttgttagtaacctatcatacaatttttgagttaacttcacccaaacttactggtttcagcaagttgcaattgggtagtttttgtactttggtctggggttagtaaacagttgtgcttgtctccacaggagtagtgccacacaacaggcagaaccttctgataaatacttaattatttcctatactaagatcttaacttctgaaatatatgcaatgtgctcttccttttactttagaatcagaaaactaataacaaaagcaaatagtgtcaaaatatgttacttaatatgacaagagaaaggctgaaaatgattagtgaagttatagaaaagcaaagcccatagaaagtgaggacatgttgactaagcctaaaaggaaaaataatccaagtttaagaaatctaaagttttaaatttgtataatctggaggttttaagtacatagctatttgtaggatttattctgaagtttaatgatgaaatagctactgctaaaaatgaaatcccaaagaaaagaaaatcatgtagaaaacaacttacacttaatactgctgaagttgtgataatctaggatgataaaatgagcactgtttctcatggagacacaaactacctggtttgttttgtttatttggttggagattgggtttcattgtgtagcccaggctaggccagaagctcagctcttctcatcattgcctgctccagtgctgagaacacaggctactgctaggaagccaggcttaacttcttacgttggagtgtgtattcacaatgccttcatgggagcagtcatttagtagcatctatcttccagtatataatatacttagtaaggtataaaaagtgcagatggattgctaaaccatgccaatgctttctgagcaggaattaaatatatgcagagaatgtctttataaagctaaaatgctacatgaaaagaaatatcatcttgggtctactggtttgtgatcatggccaaatactttaggaactgtattcttgaactcattagggaaattactaggcttatatgatatagtataactattcttgtacttgacccagttttgggtgggaaacatgtttaatgtatgaagtccccaggtaagtacaagtacaaagtcatcaatttcacttaaattgaacagaggttgtcatggcatcagtggcattatgctgaggtcataatgctggagccatttcagtctattccacattactgcttcctggattagcaatttttctgtatgtaatagggttgcaggtcatacagaagatgcttgcaggggtctattaactctatggttgcacgtcctgcttcattatcttactgtagagactagcaggattgctatatgcccagataaggtaatgcaaaataagataattaaaagaaatatcattttgatagtttttggagatcttcactactgaaaatggtccctacgtaagacacagcttgattatttatctgattatcaattcataaatctactaggaatagatatttttgcctagtaccaaagaatggtttaaaaacaatacagctagacaggcaagtgggtcctcacgataagctctttgggtgtcacgctaagtacagtgggaaagcactgaaaggtttccagcagataacaaaaggtaatagagatgttttatatttgcagtagatgaaatgtgcagggtaagaaaggaattagtaagaatgaggcccaggtttctggcatcaacaatagacagagcagtattatggaagctatcaagcattaactttagcctacttactcttaaatacaagggtcggccaagctgagatttcaaataagcagctgcctggtggagcaggtctgcctggacactggatgtccacaggcatttgcatatagatccccgcttcagtaaagttacattgtttcagcatattgccatgatataatttagtctgaagttactttctggctctataaatctaggtaataatttctgcatccctgcctcatttcaagtacaaacatttctagatgttggttaaggtcatttccctctgggctatgattgtatttttttcctacttcctctctttccnnnnnnnnnnnnnnnnnnnnnnnntactctactcacacaaacactatggatatttctattaagatgttttgccttgctgagaagtcttgctgtaacacttctcttgaaacaaatgttgccaataacaaccaggaagctaattgcatttggaggtgacaggagttcattaactaaaaaaactacaaggcctgaaaactataaaatacctgtcagaattttgcctatgaggaggaggaaacacttcaaagacccagctgtttctattcctaagtcataaaattggcacattaacactggtacaagggaaagaatcaaaggtggttaaggcaataaaagtttcatctttctttggccccaccttctcttactggctccactaggcttattcaatatgtcttcttcctgcttgtagatctacaattttattttcttttggggggtgggggtgggggttcaaggcaaggtttctctgtgactttggaggctgtcctggaactaggtcttgtagaccaggctggtctcgaactcacagagatctgtctgcctctgcctccccaggactgggattaaaagcgtgtaccaccaatgccctgataggcctacaattttcttttagcgtatgtatatgtttctcaccttcagtgtttttgccttttgaacagtcattgcaataatttgcttcagttccttattggtaaactattttttgggttttgtttctcggaaaagagaagcacacacctctaatgaaagtagaacaatgtgatcttacacatatccatttttatttccacaagagtaactgcaatcctaccctggatattaataaaagttttaaagaagccctctattcatttttaaaatttgtatgttttttcttttgcctgcatgtatgtctgtctgtgtagcacatatatgcagaaggtgttggattccctaggactggacttacagatagtagtgagctgtactgtgagtactgagaatagaatcctgatcctctgaaagagaagcaagtatactattaacaggaaatactaccttctgcttttatcatataaatggaaccctatgagtccttatacccctgcatccttggcatgggtatattagctataaactgttggaaaaaatgctttctaaaagaaaaaaaaaggtttgttgaagaaattcacaaggtattatttataatagtataaacatgatgtaaacagaagaaccaacaataagggaatgattgataaaagcttagtacaatattatgaaaggtgtatagagtttaatgtgaaatttatgaaatggattaggaaagtagaacatacaattttatattaagagaaaaaaatatcagtttgcagactgtgatctttactgtgatctttatttaaatggaaattacctatgaagagggctggcatatcactaatgcaaatgcttgttctacatgaagtggtagagtatttgtgaaatttggatgacctggatctagccaagtgaagatggaagtctttaaatttatagggagatattgttaataattcttaatgttttccttgttcattcacttatataggtagaaaaatatttggcactctaaagatgaaagaaaagtccagagattttcaatatttgggcaaaaatacatacaagtataaataagtgtgcacatgacctacctaaagatcctttgaatcttttgaaagctaagagacaatttataaaacaaggaactaagaagggaaactggtcaccaatagagttctgaaagcaatgctttgcatataataccccctcactttctccggattgggggctggcaaacagctgcatgtagaaaaagctggcttcttgtttgtttcagaatggtctaagataagaatgctttttacatttttaaggggttgaaagagaacagtgtcttaaatcatgaaaattgtatgaaattcaaatttttgtatccataaataaagtttttttggaatacatccagccccattcatttatgtatggacagtggctgcttttgtatcacaaaggcagagtgaagtccttgtaacagaggatctatctggtccacaagacctaaaatatttaatacctggctcttggcagaaaaatgtttgctaatacatgttttagatttttaaatgctatcttcggagggacatcatcaatttcccagtccagatttctcataaggatataaaaaaaaaagaaataaaatatggagtgtcacagaggtgcacagagttaggcctctgcgttttaggttcttctgtaaacataatgccacaaggtatctttgcacatagtttctttctatctctcaaagggtcaaatgtatatagtcagttctataatgtagagtaaattatataagtttctgcaacagaattcaacaagactatattaatatataaggatggaggaaaaaaacagcatttttaaatagcaaaaagtcgacaagaaggggaaagggacaagatctcctgagaaaactgggagcatggggtaggggagaaggagctaggaggaagagaaggggagaagtagagggggaaggaagacatgaaggaccaggaagattgcttccggggaagaatagagtagagcaagaaaagacataccttattagagggagccattttaggtttaaagagaaatcttgcactagggaaatgtacagggatatactaggatgaccccaactaagaatctaagcaatatggggagaggctattttaaatgtccttcccctataatgaaattgacgactaccttatatgtcatcatagagccttcatccaataatagctgatggtcacagaatcagagacccacagctaagcactgagctgaatccagttgtagagagggaggagtgattagcaaaggggtcaagaccatgctggggaaacccacagaaacagctgacctgaaaaaagaggagctcatggactccagactgatagatgggaaaccagcataggactgttccagaccccctgaatgtgggtgtaagttagaaggcctggacagtctatggggccactggtaatggaacagcatttatacctagtgtagaatggacattgggagtccattccccattaagggatactctctcagcctagatacatgggggagggcctaggccctgccccaaatgatgtgacagactttgatgatcctgcatagaaggccagaaccttaccatggagcagaagaaggatgggatggaggtcagtgggagggcatgggagtgagaggaaattgggtttgacatataaaataagattgtttctaatttaaattttaaaagggggaaaatctagacaagagcaaaagcatactagggaaaaatttcttctaaaagcctcaaagtaaagaaaataaaaatgtaaccaacataaagtatgcagaaattcatagccaaatcctataatgctaggcaataaaagcagaaaagtcagccactagaaagaaaaatgaagttcaaccttaatggaaaaattatcactgcagaaaacaagataggacaatctagatataatttttcatcccaatttatctctgttatgttgctatatgagatggcttactcctggagtttgctaaaggtctaataactgacccaaacatcacctttataactgatttccctatagttacaatatgcttaaaaaggattataatacataaagaaattacaatgctatagcttatagtgttaacaattatgtctcacccacacattttatcctcaaaggggccctatacaaaatatcttgttactacctcaattttacatatgagaaacctagacaaagtgatattaaaaatgtcctcaaggccacataacccataaatggcagaaccaacattttgaagttaaataatctgcctatgttttcaaccaatttgctccactttctcttatgtacaagagttttaggtaaacagtatttctgaacaagggaagcatagctgtactaggaatctggcatccttttaatgcctgcatttaacacacagcaattttgagactaataatggcacaatagtatccttatgaaataacaaggacaagtaagtgagagtgaaggacactactagttctgacttcatggggcttatgatgttgtaagtggttttaaacaaattatagaaaatgtcagatttctgtcctactaaatagtgaggaagaaaataatttttaaaggagagaagtaatgtattctttgatgtataggatagtaaataaaagagatagattcttgttcacagtgaaaaatacgaaaactattctcatctgtgaatgtggaaaatggactcttgtgctggaggagcacaattcccaagaggggttgcagttttgaggggaaaattgtagggagtcaccctagccccgcccaatagtcctggggcaggtaccaggtggacccagggactcgcccataagggcgtggtgaaggaaagccggaatgacgtaagggggcttcttaaggggctgcacgtggggacggggacccctctttgttctggccgcgctggctgggttcttaacctagctctggcctgtgtttcacccggctgtgctttgaaataaagagaccttaatccaatagaaaatagcatgctattctgacttcacagcaagctagggttaaaaatctgactgcatcaggttgacagtgtgacttttgtctcatatgtagaagttgggatttgaagagggcaatatgaaagaaagatgaaaaagtaaggtggcataagataaaaacacagggctaattctggatactatgattgaaatgagagaggagtgattagcaaaggggtcaagaccagcctggagaaacccacagaaacagctgacctgaacgagggggatgtcattgaccccagactgatagccgggaaaccaacataggacagacccagacccccttatttgtgggtgtcagttaggaggccagggcaatctcttaggcctctggcagtagaacagtatttatccctagcataggaatagactttgggagcccattccacatagagggataatccctgagtctagacacatggaggagagtctaggccctgctccatatgatatgacagactttgaagattcccccatggaagacctcaccctccctggtgagcagaaaggtgatggggggctagtggggggcagggaggaggggagggagagggaactgggactgacatataaaacaatcttgtttctaatttaaattaagaaatatgtatgtcatgtgccaagtgcaacaaggagggaatacacagattgacagaaaagggagaagaggtaagaaaggtggtgggcagaacagaacctctggagatagggatcttgatggcagccatatgccatgcaatgacaaagtttaagggtcacatgtattgtagaagagagaaatggagagaaaaaattttgactcaactcaggtgacactgtgagaaatggtagttttatcactttatgattttgtcaacctttgccttgtattgatcactaaaaggaaacatttattaggattattctttatcatattgcttctgctttgataattttttccttgtggatggtttggtgtcattccttgtttgaataaagttttagaaggaaggagaaaaagaggtctgttgaagggttatgattagcataaggagtcaaccagattttaatagtgataatttatcatttttctgtggaaatgcagattgataaaaataagtgtattttggttctccaatgacctgcattaaaacctcttcaataatctcattttccatattttcaaagtagataataaagaagtaattgggaatactttgaaattcataatgacatgttattgtaagagtggttttacttattcaaattacattgaatttacaagtcacatggacatacttggataattttaacaccagactgtaacttcaggagtaattttttcttaaaaaatgtatagtgtcataaaactacattgaattatttgtagttatagatactgttgccatctctatttttaagtggccacagtatacagaaatgaattcataaaaaaaaaatccagtgatccagatgttgagatgagtgaaccattccttggctgtaatctcaacatgttttgtaagccaattaagtcttttaagcctcaagagggtaccagcaaggaccctttcaaagacaatccattgaagaaaagctagaaagaattaataggcctcaaatttaatccaaaaatggccaatggtcactttagacttgtaaacaaatgtgtgtaatattggccatgcaaatttcaattctgtataacagatagtaaattcatcatatgccttaatgattcactttgataaaatcctaaggcttctcataggatccctaggtgaatgtataataagtacacaacaatactgcagcaacaaaagagctggtctaagactcagaaggccaaattcccatttattttccgtatgattttgggaaagatgcataatcttccatcctatatattttcatttgcaaaaaaaggaattaatcctgcctacctaagtgatcctgtatgtgtgtgtggggggaatctaaaaatgataatactgatactactactaatgttgccctaaggaaactacctggcaactgaagtgggcagctccttaagtttttatggaaagaggtaatatttagaaaacaaaatacagtatataaagtctttttcacattgaacactacaaagctgccaacagagagaaagcacttaatgctcctacccaactgtgacacctatgaacacaatgatcgcatggcatgcttatccataaaggtcagtaagtggcacttgcatgtcactagcaaccaacagctgtctaattggagttaagtcatactcagcaggagggagataatgcctggtactagaaacggtactatgcctagtgagcttatggatcttagaagagaatctaccattgcaacttcgttagagcagcacagttctaaatcttatccatatatccacagataagtgtagccattcaaagaaccttttaaccaccaatgaaaaacagaaaatgacaaccatacacaatacagagactaactggatcatgaggagcccattgtcaatggatgcatccacatctcaactcttctatctacagctcaagaacaacaaggaagaggaagagggaagactcttaagagccagaataccaggaattctgctatggaaatcttttagaaaggcctgcatgaacatgacatccacaatggcaatgatcaacagacacgttaatgtgggaggggggaaggaactggccaagaaactacaggcaactggtgactgctcagagttggagagtttgctgctcctagacatgagctccctaattggttgtacaatacaaagtggtcaacccaggaaccatacacaaacataacaacagaaatagactcagcaggttatatgtatatctatatatgtaacagtaagaaatcagaaagaagaggctaccaatttgagcagggtaaggaatgaacttagaaggggctcaagtaaaggggaaagtaatataattatattttaatactaatatttaataaaacatataaaatacctttcacagcaatctatgtattctatagcaaagaacagtaacatttgttgttatatcatcaacctagaaaaataattatggttcattttatacaatattatatagtataaattaatctgggcacctttattttaatatttgtgaagatttcattccttttccataaacaaaatgactattttacacatggaattcttatttgagctcagtgtaatacaaactgaactctaaatgcagatttctttcattctaaatagtagttggggtttttcatggtttcatttgctgccttttatgttgcatcttgccatttagatggaagcattccccagaacctttttgctctttttttcctaaaagctcttttttttcttaatgcatttctttttgataaaggattttgttataatatacaagctgaacatctctatagctaagcaacaacttcttaaggaagtcttctattctcatgttcaactacacagtgtcttatagcttcacaaatagcataaccaaccctagcagaccactgtaccactctcctagctatcattacttgaaaccagaaatctaggctttgctatttacattattaaatagctccaacaagctaccaggaagcacacagcattatttctcaaaacactttgtccatcttttaagaaattatgaaaaatcctgtttttattagtgtggtaaacatataaatcaatgtgttccattgtgatagtttaattggcatccatctttttcattttattaggagtgacacttttctgaagcttacaatcatctgttagattactgaagctggttttcgtactttcgatctatcccacatgataccttggggggaaaaatgacttttagaacagtgatgtcaccatatcactactgatttgatgatttacgattaaaaccttcaattacatttgaagtccccaaagctaccatacgttactgactgaaattagaaactaatgaatatgattaataacctgaacacaaatgaagagatttttaagatagaagataactaagtactacagatcagtgggaaaatacttgctatataaatatatgtgtttcctaaatataaaaaatcagtcataatctccatggtgagcataaaatgaaaatagttttaatcaacactatgcagcagccttactgtctctggggaatgaagttttcagctctgcttttttaacacatagatgggccaagtttctctctgtgctgtgtattataaactacaatttaaatcagttctttaaacatgcaaatcatggttcatacagagactcctcattgatcttgtaaaggccagctctcagctacaattttgcatgacatagaaggcgaaatatcaactttgccaagataatctcattttattgcatttcgacagtttcttctctgcaaattgttggtaatgtcaccctttaatgagcagagaagtacagggattctaattttatttgagattttattcatttaaggggaagagttctctctattacttttcagaaatagcaaaactatgtcttatttacataattgtaaactgctcattttcttttttccattaacaggatattgctgcttaacaaagggtatgatcttaggaagaaaaaagtgagcacacactaatgagtagcaacaagcaacattggattgtttttctccttgtctttcttatcatacatcaacagatttcattttccacacgaattccttcctcataaaaatattgtcaaattttctactgtacacatggaaactagttcatgacctcaatcatttccagactcaagggctcatattacttgtagttaaagtttaaatattaggcggaaaaaactaccagttccttctaagatttattatcctactgctttttctaacataaatttgggctcactatgcagcaacaaatagtttaaggatctaaacttttgcataggtcatttcaaagctgaattgcaattataaaattttatatacttatgtcttacatcaactaacctaaatgtaacacatcagtccactgattactacctcttctgtaacatctatctatctatctatctatctatctatctatctatctatctatctatctatctatctgtgtaagacctagtgtgtgtgtgtgtgtgtgtgtgtgtgtgtgtgtatgtatgtatgtatgtatgtatgtatgtatgtatgtatgtatgtatttctaagtgtatatacatgcattacatgcctcccggaacccatggaagtcagaaaagggtaacagatcccctgggactggagtgacagaagttgtgaaccacccatgtgggtgttaagaattgaacctgggtcggatacaagtgcagtaagtgctcttaatcactgagccatctttccagcctgattattgcctctactcatatgagctaatggaacttcattttgttttaatctttacctttagctttttcttttgcagtggtaaggatctaactaacagccttatgcagctgaggtctcactgcctttgatccctaaagaactaatacctgtatttgagactacttaatgtgtttctcttggtcaagattcaacccgataaattcttttacaatatttttaacactaaaatcatattcctgtttcctgtttatggataagagtactttttgtacttttcaataaacctaccataatgtactgtatatagtcagactatgggaatattgcatggattgaacagatactgtttagtgatttcttaatcatttaagaaagaaatatgatgtgtcttgaataataaatggatacatggaaaaatccctaaaaattcacatatcatgttgatcatattgagtcataatactgtaatggtttgtaagctttttagcaacctcagaatattcaggttttctattaagcctaattatatttcatgacaaatcttgtaatattagcatattttctatattgatatgatacaagttatatctggttattagaaaaataacacaaatatgttaatatgtaacacacacattcacacacacacacacacacacacacacacacacacacacacatacaaacctttagtgattcatttcctttaggggattgtatgggtgaactctatgactgtggcacttatgaaggttagtacaattgtgacaactgacagatgacagaacaagttctaactgcaggctaccaaagcagaattccttttattcatccactgcctgtttttttaacattgtatgttctcaagtatatgtttattttttcctgttcccaaacgagcccagtcatgtttctaattatagcacacaattcctaatgccacatttacttgatattcttgtatttcatcaaccacttccaaatttacagtaaaagtgcactctattaataattcttaccaatttaaaaatattcctgtgcctttgtccattcattcagatatttggagttgagtatagtaaaggtattctctccccccttctctctcccttcctccctctcccctcatccccatttccctctctctcacaaactaactatcctcttctctctgtagaccaggctggctttgaactcagagactttcctgcctctgagaatatttgtatctagcctgccccataaacagttgattcttctactgttctctaaatatttattattttaaaacctgtaaatactatcacacctgtaagaatgtacaattccttggagcaattgaaccatcttttcctatagaacctggtatgattgggtaccagtggaagccctctctattcatcacaattaaaaaacataactgggtaaaatgacaggagcctatgggaggtgagtttaactttccagaaaagagaaagatttttaaagatacaaacatattggctagagatgttgatcagtggcatgcctaattagctagcaggtgtgaggcactgggtttgatgcctactaccacatacaaaatcagaaatataaacatgcaatgacattttacataaaagagaaaaatggaacttattaacagttttaatgaatatgagtgaacatcagtcatttttttatgttttagattttgactggaaaagctaattagaacatcaagcaagctcaatctcagaggtcagttacattaggtgttcataaaacaagatacactcatgaaatatttaaacagacaaactggaaatagtatctcaatgccaatcttttggatggaatgctaacattttctctacatgttaagattttatggttgtctgcagaaccacacttacatataacctgtataacatgatgaaacttctaaaccagtttccagacttgtttctggatttaagtataaagaagttcaaagttttgaaggaatttcagtccatgttttaagtttaatacctcacacttgattgtagggagacactgtagccccgcctcctaatagcctctacaggtgtgagggcgtggtcaggggaggtctaaggtgatgcaggaactattcttaccatcaaaattgatcaagattcgagttgaaaaagacaaccctctcggcaaggataactgacaggcatttactgaggtgtatctcatgaactaaataaaagcctcccaaaggaatagtaagtgctttgcttttatcttcacaggaaaacccacctccagaagtcaaaggacactacatgggtagatacttaaaggaaagaaggtagctataaccatcaaacaaaaggaatgtgccatgcggaaaactttacagctgtctctcaaataactctatttctcttcatttcctagtccctattcaattaaatcaacgctggatttagagttggatttggctttcctcacctaaaatccaagcatgttatttagctaaatattaaagtttctgtgttatatcaagaagccaattgatgtaatacagaatgaagaatttgagcactatcttttgtcttttcttggctctttctttcaaggcctacaccctctcataattgtcgtttatcattggtcgcctttcccagtatacatacatgtgcaagcaaacaattctctgctgacacttatgattgagtcccatacagtccatgaagacccgcctgatgacaatccctggatgctccggaaaaaaagaattgggccatacctctctgactgcactggattcaacttactccgtttcgactgacactccaactagagcctcgagtactgacttcaatcaagttgaggatttcaacctagatcttcaatcaagcaaatcccatctaacatggactggagatgaccaaatagagactttccctgtgctaacatttttttccacaggaccccaagaggctaccatcgttccatttcagtaggaagtaacttagaagatgctacgcccccgctccccattattgtttattagggtagtgtatgccgagttaggactaactttcttattgtttagagttgggaatggaaggaggtgttcaagttacacaccctttccacatgactttagggcttagctggaatagacatagttaggatgtgcaatagcagatatttcacctttatgattgttaattttggatgttttacactattaagttttaatcctcttttagactaaaaggggaattgtagggagacactgtagccccgcctcctagtagcccctacaggtgtgccgggacacgcccatgagggcgtggtcaggggagttctaaggtgacactggaacgattcctaagggaccacgcacacgtgaatagccccttctttctgtccaatctctctggcctggcttccttgctgcccctggcacgctctggcttgtgtatgggctggtgtttatctgaataaagaaattttagccttacagactacggatcatctttgagcgcatgcggcacacaataatcatcacttgatattttaaaaagctgattttaaatgatatgttcaatgattttcaaagcaatctacacaatttttgtaaaaataacacatatttatgtaatatgagttcttggatcacataatattgaactggagtaaataattttactatggaaaagaaattgcaaatggagaatttctggagactaagcacagttgagttacagtaaaccaaagtcacaaatgatgagctcagatgaacaagggtattctccaagacagtccagtagttgtacaaaaccagggtgtcctgggtgtcagtcaacaccttcagttcagtaaaagtactcattacaaggaaatgggataggagcatttgtattataaagggaagaatattgcaagtgttgtaaccttcaggaagcctttactaaggtatcaatttcaagtcttagtagacacagtgagtcaagcatttgtgagacagctacctttttaaaactaatgctttgtttaaggattaaatgccattgatgttcaagttaatgtaacactaaaaaaccctttcttcctaaatgatatgttgataatctggaaaggaacaccgagtatttcccttaaaagacatcagttttcttaggacaaatttatttcattggttaatacataccacaattcaaagaagtaaattaatacaaactatatctgtttcaacattctttcttgccagaatgaaggaaagaattagtttgttgtcacatttgcacataattagtgagaagtaggatcattagcagcagaaagaaatttattgatgggcctcattgctctcagtccataaataaaaccattttacttctaatgaccataatccacctccttaatctgacagtgctaaattacagatggatatctaatgatctccattttcccttagtttattaacacacccaaaattaaacagatatgatgtgaccagacaatagttaaaggaagatcatataatcacttcactgtctaaactgtgttaattagtaacactaacattagtaactgtaatgtaattaaaatcctttcaatactgaaaactgatgttttcagaacatctaataatcaagacaagagcaaactccaaacacatgaaataccaccatgaaaataccctagagtatgtttaggaaatggttcctactccacttgatattcaagatgtacctatccttatagcctatatttaggtttaaactaagaaacagggatagtttaccaataagctttctaattttagtagattacaccttggaaccaaaaaacacctaagttttgctatttaaattgccattgccaaagggtttccatccataattgtttgcacctacaaatgaacaactaaatttaagaaatgagagttaacttaaagtttatggttcacaaatattagtaagaaatacacttaattcagtagaattaaaaatttgtgacataatagagaatatttattaaatatcaattaacctgaatggtttagctagttagaaaatatgaagttaaaataggcacagtcagaaaggaaagaataatggcatttctactgagggagtcaatgaaaacaaagtaattatgaaaattttgttgatttgttcatcaattgaaaacatatttaaaaggaatggttatgctgatctgatctgcatttaaggacaattgtagagataatagtatattactttaaaataactctatggtgtagaatgatctaccattttatacatacagaatgaatacaggttaaacataaaacaaacaaacaaaaaactctttggtataagtacatttaaatcactgctaagctaggcatggtgtcacatgctgatagtgggcaggagggttaccatgacttgaggctatgttgtctaccaagtgagttctatgtctgtgtgacctacagtgagaccctgtcttaaacaaaatgcagtaacataatgtgaatttatgttacttaatgtgaaattatgttacataatgtgaaatcagaacttgtaaggaaaagagtaaaaagtaggttaatatttaaaaagaaaacaagctgcaaaggacactgtaatatccaggtagttctctcagaattcagttgtcacatcatagtaacattgtgttttactataaaacaagccaatgactaaaaagagattatatgatctttagactttatttaaagttatactacattacccacctcccttgccccttgctacctgtagcaagcaggggagctgtcgcagcccctcaccagctgcagcccttggaaaagtgggccttgtacctagcctgggcagcaacgtagagccaacccagttgaaaggaaggtaaagtctgggcaatctggccctgcccccatctaccatagattggcagtggtgatggagagatgccatcctccacctgcccctcactacccatggccatgaagagctggccctgagttcactagagtggaagaattgtgcctgcccttcaccagctgtagcactcaagagagtgtcctctgcatcttgccatggtgacaacacagtagacctggccctgatggtgtaggggtgggtaagctgaccctgagtgcatgaaaggaccactaccagccccaccatttgctccttgctgaactagccaggatagtactgaggagctcatcctggtggtcaggacagtggagaactggtgagctgaccaacccaacaacaacccaggcccagaaccaaggctgagtgggcccaccccaatatccaccccatctgtgacctactagagcatgtgaaggaggtggccttgcagatccgaacccgaaggatctccacaacatatggcaaaacaaagatattcaagaggagtcccattgaaggtccactattgatagtgtagcagaaatcaaaggccttgaactagaccaaagactctgtgcaatgaacatttgcaagcaaagatctatagactaaagggtttactgtgtgactcactgtttcatactagagcttccacactgagattttcctttgtttttttctctttttcccttaaattttattttattttgtgggagaggttacaagtgcatagggaggatatgacaggatgaggagatgaaacagattaaaatgcatgatgtgaaagccacaaagaataaaaaagtaaaaaaaaatactatcttatcatatttgataaaacatgtttaagagcacttcaagacatatctcatctcatatttgacatttgatctattaaaaggtagctggcatggatttctatgtattaatacagttttggtcaagatgtttgtcactcgggtgaatgtcatcctatttatgaatctagagtttgtttttcttcatcaaatactgaaacaaagaggaaactaaaagaataagcattgatgtggttgatatacttttcaaatacactgttttcttcagtgtgtataaaatgtggtttgctactgaaatgtaattaaatacttcagacactgttggaataacttcatctaaatacaaatccttggaacaaaacccaatttaattttaatctctgctaaaaaaataagcacttttagactacagagatagacatttagtttcaatcatacatgcactttagagaatcatttcattccaatctcgatagtctcagaaagggtagcgttgggtgagcaggattgtgtggtggaaccatgggaaaagttaaatacttttacttggcacaaaattttcagcaagaaatgccagtgaacaacacataaattaatcaccttacttttagacaaaaataccaaatagttacctctttgtgcaatcaaagttacctttctgtagatatattaccgaagaaccttttcttaatgaagtacatgtcagccactgtcttcacaacccttctaagatagaccttcacacggtgcaaacagtaattttaattgagctcaactggacagtttggaaaattgtctatttatttagcttgagaatcaaatatacattgcagggattataagtcattgattattttttcttagaaaaaaattaatataagaatcaacttgtagacacaaggctgaagcatacaaacctgctaattcacaatttgaaaatggtgactttcagcaaccacacatgctttgacctaatatgatattttgcttcaaccatgccatatgctaaaaacttcaaatcaactcactatgcatatcctctaaggacactttaggcactaggaatggcagtcacatttgcagtggatgcatttttagggaaaaaataagacttcagccaaggacttatttcaattaaattaggtcatttctttctttttttcaatggaaaccagaaatggaactgaagatgaaacaagcatttgctcatgattcccacaaataaagggaaaatatctgctaaatagtttttaatagtatttctcttttgatataaaaagattgtatgattaggactatttatacagatacatgtgtacacatacaaatccttatcagtaaatgtgaacttattattctttatctggaaggacaaatacagtgcactgaatgtttcttttctttgaattttagtaagttaattataccacacacatagagaatgtgttttctacagcttatacacaacataaggagaagagtggcttttttaaggaactgctggcaacagaaaaattgtatgacagcaaatgagtaaaagtttgagaccacaagccacaagtggagttttgaaacattcaagagttggcacagcttgttagtacacctacctctctgtaaccatgccaatagtaccatggagtgcctcccctcccagccaccatctgctcccacaccacctagcctgttcacacctcctcatctccattgtaccatgcccactgcagtcccacccaggtatctcattccacagtaactactatggggtggtggggagcagatggtggaacagaagtgtttaccaataaacctctatcatcaagttgttgcttttattgctcacctcgagacccaagctaagtaatgacattaaaggtcatgggtgatttctctttttactttccaaaattgatgagcactgactggattcatatttttttcaattaaacttgcatgcattccagaatctttaaaacattgcttctacttctctaggagagaggcacaaaagtaggattcagattagaactgaactccatacaacaaaagacagtcatggtaataacattttgacagaattctgggtatattgaggaaggaggaccacacatgctataagaaatgtggcttgacaataaatacaggtgtaatttcctgcttccagtgtttattctgcaaacaatctcacaatataaactgcctctttttcctaccatgaaaggaaaatagctctaagaatttactgaatcacttctatgatttttgcatgcctgttgagagacctgttttcagttttagcatgtccttgccaatcttctaagtggtctataattctcaatgatgagcattttgcagacggtaaatctaataactctgacatctataaaagatattcagttggtgagttagatgaaaaatgatggtgcagaaattgagcgtaccttgggataatgataaagccatgactatggataagcatatagcttacactcaatagtttttatattgagctgtgcttttatttcagtattattgacattcttgaagaacatgcaaaatggtgcaggaatatgtagtcatatttattcaatatatttcattgtaatcttagttgtaaattcccaagaataaaaatatacctccaagatatgatcattttgaaaatgacagaaatatcacttataagacagatcagggatatattttatatatttatttttctattaaaactttcttacgtatcatgaaagaaattgtgttaactttcttttctttatgctcctgcaaaatgaaaaaaaactaatcccaacattttacttcaaagagttaacaagaaaagtattcacatttaattttccaatgtaatgcctcacaataaaacatggtcaaataacatatgcatgtttactgctcatgatagaaagcattaagatattaaatatatcacagaggattcaactctccctattgaaataattataatgtttttcttcctgtgcttttagaaacatttgaaaatacagaaaattttttgaaggataactttgctgcttccatatatatttaccactttcattacatacttagctaatcaaacaaaggtttgataatttctctaaatacctcaggacgtctttatttggaagcagattgaaatttcttactctgattttaccacagtttattaaacagaagctacagacttaaccaaataaagatattattggaaaatccactttattttctcttatggaaagggaatatttaacttctcctatttgatcaagagattcaaggtaataaacccagtgaaacaaaatgaacattcatgcaaaattttaagtacaatttgattagttacagaaagaatgacatgaatggagaaaccccttcatcttaattcagcgtagggacagaatagcagtcttggaaaaagggagtgaacctgatagcagtgctggagtagagtcggcaggtgcatggggcagtgaaatggctatgtggcgaaaatctttgaatgatagtctaactacctgcgagtgatccccacaaccaactatggaaggagagaaccaactttggaaagttgtccttaaactaccacagcactctaccccacatacatgtccactcacaacaacaataaacacaatgcgttataagtcaaaacaagggaggggggctgggagagaagaggtaggagtaactgcagtagggatgtaatgtatgtaaagaaaaaatgaaaattacaaaaccatactattaaaaacaacagccaaaagcaatgcgattataaaactcagtaaccaaaaaacctagaaacagaagtatatttattttccttagtgtagcagatgaacttccaaatcatgggttcaagaaccatgtagtatgtggaggttgtactgtggtgaataattcatctcttctgtgtggttagaggaaaaggggcaacttgaaacaaaatgaaaaaaaaatcctatagttttcatcagtatttaccctctgtattgataagtataagagtggcatggaaaaggtgatgatggtaggtataatatataacttggaaactttgcaccaaatacatttttgaatcctgttcttacttccttggatgttgatctataccatagtagattttcaggctaaagtggtactgttatcactattagtattttagacagagtttggctatatgacccaggctagcttggaactcactatgtagacaatgttgaacccaaactactcatcctccttcctcagtctcttaaatgatggaatttctggcctgttccacctaacctgatataatattataaaataacttcaatatcacaaaactctttgtatcatgtgtgagtgctttatgttacatgtggcagacatttctgttccatatatattcttccttccaaaatatatattctaatagttgagcaagtaatcacataggtaagaaaaatcttgagtgccctaataaaatgcttaaggaaaaaaaatatcattgggctcctgaaggttagacaacactgccccaggtgggcatcattggcaatagtatgtattttgctctgacctgtaattttcctaccatgatcacacatattgcagtctgattgttagttcttatttatccctgcattctcttaacatttattggtttattcagaaaatatgagctaatcagtttatctataatccataagacaatcctttgtatgaatgtatgaagacatttctctctctctctctctctctctctctctctctctnnnnnnnnnnnnnnnnnnnnnnnnnnnnnnnnnnngtttttcgagacagggtttctctgtgtagctttggagcctatcctggcactcgctctggagaccaggctggcctcgaactcacagagccgcctgcctctgcctcctgagtgctgggattaaaggcgtgcgccaccaacgcccagcaagaagacatatctttaacaaaggcaaaatcattctaaaagatgtttgctacatgtgaaccatgtactataggctctcagtattagtacttcaacaacaaaattccatgctaagaaacactttatgtaatatctctcaaatacatatgctagttcatgggttgatgtggctactaatctgaaatactttcagcagatgttgagcatcgtgtattaagtttatatcacaaccaaaaagagctcatttgctccaggaagaagaggaagtagtttgacttagacctcaggatttgactgctgaaattactggaccaatttcatgcttgtatgtttacagggaaaaaaaggccttagagtatgcaaactattcactacttgctccttactaacaacagtctatgtgtcttacacaagtacacaaaagcatatgttttacacacacacacacacacacacacacacacacacacacacacactttctgccatgcacttcagcttaaattggagtacataccattaaatctttttaaacttgaagataacttaaactgaaaatgtatttcaagtatttcatctattaaacaccccttagctttaaaacaaagaaaatatcatatagtttgttactacattacttgggtgactaggaactgtagctctctcctgctgcccagtattgagggacatcatgccacataatgttactagaggaaaagatcaatattgaaattagaagtataatttctattaaatggatactgcttttacattatctgatttatagtggcttgactgtgacaattttaaagtaaaaaagttttaagacttttacatgccaggaacacaatataggtaaacatattatttattttccacaatggaaatgcaattaatttaggcagcaaaagatagccactgattaatatgacaatagaagccaatcacccaaaatttattagatggattttaatataaaatacaggagttcacaaaccactgagtggtcccttatcaatacaatctaattggccaaaggacatttcaaggcctattgggtaaatgacagaagattcaaaagaggaattattttgttagccttcatgttccatgtaggcagggctaatggttagcagagaacttcagagtcattccacttttccacagacagtgatatgattcacttctcagagctatctcttgattagaactagaatttaagagtttttgaagcaacaagatcctatttcactcttagtatacatgaatgattcatatcacagttaataacagaattactgcatgactagggaagaaaaatctccatgtgaaataatgatgacccaactagtaaaaggcctctaaatcaataagctgctaagactcaatgagacagaatcccatgatattcacaaaaatcatattagaaagatcctaagaggaagacaagaagtccaatgtctctgaagaggagacagatttgatgaggtcattgtatttccttcaaaaaaccaaataaaatctaaacctacttatggagattgcacactacatataaatgaaataccataggacttattttcttaaacacataaatgtcttcttacatgagactaaaccatatgcattacttttattactgccatttcgcaaattgaccaagccaaacatttcttatctacattgtacttaatactacagtgacaatcccaactaattcaaagaagaagaagaagaagaagaagaagaagaagaagaagaagaagaagaagaagaagaacagcagcagcagcagcagcaacaacaagaacaagaagaagaagaacaacaagaagaagaacaacaagaagaagaaacagaccaatattgctaatttatggtaaacattttaaattttcagattctttttatcatgtatcctagggtaacctcaaattctctccgcttgtagagaatgaccatgaatttgtcatctttgtgctttctcctaccaagtgctagaattataggaaggagtcactaggcagtttctgtgattctggggatcaaactcaccagagtttcttgtatttgagtcaaacaatttatttatcaaaggatttatgactacaggcaggaaacatatttaaagaatgaaatttctagaaaatctaatatgaagcccttttaatgcatgggtgtgtgtgtgcatgcagtgcacctggaactcatagtcttggacaattaagtacagtctccatcactgagctatatcccagtctaaaacaccacagtctttcacaatagcctaacatacacacaaaaagaaaataatctttgttgctgttttcagtgaaaacataatactgaaattctacaattaacgtatatggtagtttaaattgaagactggccataaggttatggggtacacagacttgcttctatgctcgcacaatctagtgttagattctcttacaactacatttttaattccctacctttacatgccttactttttattaggaaattattccaaaatcaagaccataaccatatactcaagccaaggatgtagctcagtggtagagcatcaaacaataacaacagcaaattaaacaaaacaacaaacctatataaaataaaacaaaacaagctaaaaaaaaatgagaaactcacagctgggtaaagcttccatagacctcactatgccaagtttatttctgcaatcattgtactccatagtactgtaagaagtggcatgaattataccacatagtaatttatatccttatagatctgttttccttactatgttgaggggttctggatgataagtacgacatgacatttctctttgtatcttcaaaaaaatcaagcatataatagatgtttaataagtactcattcaatgaattagtacaaatgaaaaatgcaatcactaaaacaaaatgattctctataataaatcaagaacatatttacattgttcctaaaatcattcagcctctactaacattaaaatagttacaagttattggaaacacttggaaaagatgaatataaatatttgctgctttggttcccctgataaaggcaaccaaattacaaaatataatatgtaacagtatttaagaaccttaggtaagcaatagcaattagaaaggtggtgaaagaactggcttagatgtcagccttgatgatattaatataaagtgtcatacagtatggctatattaaacatttcaatgaacaagtttctttatcttgaatacacatgaaagtagaagaattcttaagagattctggtgagaagcatgaaaaggagaaaaggaagtggtatttgaatgatattggccatacatgtgaatgattggctcacatttggtggagatatttgggaatgaggaggaggtgtggctctgtgggaggagctatgtcattgaggggtgagctttgaagttttgaaaacccaaatcattccaattccctctcccctctccattcttcctcaattccccttgcctctttctcaccctctctgtcacgctcctccctctctccctcattccctctcttcctctcttgttttctctgcctcctgtatgttgtctcaaaatgccagctcttggttattactctagagtcatgcttgcttgccctctctcatgccataactctcatggtagtcatggactcaccctctgagtctgtaagcaagtcccccgccaaatttttctacgggttgccttggtcttagtcatggtcctttgtcaacacagtagaaatgtaactaagacatagactttatttaaactacttgtttttacttgttttgattagctggaatcaaaatttgatcaatgttttcactgaaagacaagaactatgcttattattttcttattttaacagatcttcatctcatctagtctcatagtaattaccctcaggttgccttgttaaagttcatatggtatgtaaaaaaaaaaaacaaaacaaattcaacctcttttttccataatgacagtatttatatacagaacagacattgacttttattaaaatgtcacatacattacatactgaaaaataattcaaattgctaccattcaaaacattataattgctatatatttcaactattttgtagcatatcacaaatcaaaatgtaacaatggttacagaatggtgaagaaactcaaatctgctcttcaagttcttaaacaatgaattatttatttattgttattttttaaaatagcattttatgtagcccaggttggccttcaacttctgagttacctcttcccatcacagaagtcctagaattctagacatacgctaccatacagtctttgcttggaattctttttgagaaagggccttcctatgttgctaaggcttgtctcaacttgatattcttctgccttactcttctatctagtaggattacagcagtatcacaatcctaggactcgggaggcagaggcaggcagatctctgtgagttcgagaccagcctggtcaacaagatctagttctgggacaacctccaaagccacagagaaaccatgtctcgaaacaccccccccccccaagattatataatgttgataaaatatgtatgctcttattcaatttaagaaagaactatgaagatcatcttattttattttagcaatagttccaattttttaccattattttaccataaactaattaatgctgtaagtagttattctcagaggaagacctcaaagtcagatataaaactacaatatgtcagttatcctaactcctaacaagacttccagcttttataattgtcaactgaaaaaatctaagaactatattattgaatgtcatgaggttaatttttatgtgttttatgtacacaagaaaaaatagtcgcttgattaaggctagctaaaatttgacagaatagatatctaaactagaaaaattgaaaatattgcattcatatccatgcagctgatgatataaccaaacccacaaaccacaggctatctagataattttcttaaatagtctatgaaatggagagtcaaaaatcacaactcacttagctaaaatgcttcaaaacacactaaagtgatagagtttacatggtctttgaataattgtctcactgcacacttggaatcccgacagttctgaacatatactcctaaggataatgctattcagcagagtttgttcaaatggcattttatgtgtggaaagtatttttttatgcagaacacaaaatagtggaggttatacagtgatatcctttaacaatattaataatggactgcaataaccaaactaagatttttcatcccattgacaggaagaacttcaagatgttattaaataaatgttggaatggctctatgtgttcttcttttctgattccacacaaggagactgactggtaattaagtcatatgtccctttttataattaggtaaatgttattattgttttcctttaggctatatttaccctttatatatattaaagcactatgccttaacctatatactagagagctaagggagtgtagcaagtgacatgcctcaaacacattataagcaaccatgcacaacatactaggtggcatcactgatttatgaaacattaacaatgtggagcagcattctaatatgctgtgcaatgacagacaaggtaaaggaacagagatcttcagattctgaaatgaggtggtatatggcaaggatgggaaggcacggggaataaaatattgactgtgcactgtggcagtggtaaagtggatgaattagtccaaaacaatcactcgtcaactaatggtgctaaactctcaagaaagtatcgaaaaattgttctcagtggtgtgcataatcttaagtctttaatggttgttcacaaagtactttctgttggtttaacagaaggattaattagccttttttattttgtacaccatatacatttagaatttcattttgtatgcatttatacattgtatgcttttagaattttaatgtccattagatgctttctcttctttgaaaggcagatcattcagcagctctggtaaggcagcatgactaattagccttttttctctacttcccacatataccaacttaagactatgtcctgtccttgattctacagccaaattataactacaggtattaaaagttacattgttttgtggaccaactacttacattatgtaagaaaaataactactgggatatatattttaacaaaactgatacccatacaattggctcatttgaaatactttacaagtgggtgttctcatattctgtaattaagttttcactgaaagacaagaactatgcttattattttcttattttaacagatcttcatctcatctgtcacaccacatactgttcgtctgtacattcatacttcacattgatgtactttatgtgtgatttaatctctctatcccaagggcctattttagcaaaaacaatatttcaatttgtcaaagacaaagtgcactgtgcattgatttcactgtcatgtccatttcctttgccaagagggacggaacaaaattttaagatacgagtgcttcataacaagtctagcccaaagtagctcatggcctcatcagagtttaatgagacattcgatctaagaaataaattaaatgacattttgggatcatgcttaatgaagcaggtatatacagaagctctgcattgcaatagtgctcttagaatctgtggagaatagggcaggagaatgtcatcaatcatttggtacaaaatggcactctgtggaatagaaattgttgaacctcactagctcctggtctcaatcatgccccagaactagtttcttgttatgttagtgccataaaacagtctccacatgcctacgttaattccataagtcagtgtctcatcattgtcacaagcctcgaagaaacatagtatttgtgactttagagttaaacaaaagaaaggaaaataattttggaaaaaacaaagtagaaattgagtttaagaaagaagttttcttataagagaaattaaaaacttctgttaaaatcattaaaaagtaagaagaaatgctcttaataactaaaacagtggacatacaacagcttttataaacatctaaactcaattagctaatatgatttcaagtctataattatgtcactaaaaattaaatcatattcttattttcaaatacaaatttttcaaaacactgtcatagttcgtcacaaggttgtttgataatcacaatcttttaactatcattaaaataaataaaatgagtaaacattgattaaaaacaattcacataaataaaaagcatagaatgtgatctcaatcaggaaatggacagaggacatagggtgatgattttcaaatgaataaagttaattcaaagaaaagaatggtaaaatgcctctcataaatactaacaagaatttcagttacaaaatgagactatttattggcacaagtttcgatgtctacttgaaaaccaaaactttcccattgagtttatgtgtttgtttttacagccagctatgtttaaaagcctgagtaacataaacaaaacagatcaaagtaatgcttatgaggctttattgaaactcatacttcattcttgaggattgtgtatgtggatgaaatcttcccagaaaacgtgtttgagctctagaaaataaaaattgttccttttatttctcccccaaaatatacagtttcagaaaataagtatttttccattaaatttctgtagaagttttgttgaccattcccgtttggcaaaagtagctaacaagagaaaagcagctcttatccgagagtagctaataaactagttagttctaccctaaccttacaacggactgagaccaattaaaaaaataaaatgctattctgaagtaaaatttgttgttacaactgggattgcagaacagcttgattccttaagagtaaatctgccttcaggcaggtgaatatataatcataggaataatggttttctatgttgttcccgagttcaactaagaaaccaaggcagggactatgcgatatttcctattatatgcatatcacataggacactgttggtctcaagagtgatttttggatgcatggatggatgaatgggtggacagatataaagaatattgataaagaaaaatactagaaccttttcctttatatgatggttcaccttttcttttaccaataaaataggaatttccataggaaaattatcagtacatacatatagcttagtagctctcatatataactggttaatgatacttaaattttgtacattatgagatatgtggcagatgataaataaacatatcacttcaaatttatttatgagaaacaatgggatcaaacgttgactctgacaatactaccttcactattttgagtttgttacttagctccttggtgtctcagtatgtcagatcataaaatgggctaatgttggcttttatatactaaggttttagaaggattaaataaatcaatccattaaagtgataacaacagtatgtagtatattctgaactcaacaaatgacagatgttggtatgaatagcagcatttgttatgagtattgttacaactttcccatagatcatcttctttcttcctcctcctcctcctccttctcctcctcctcctcctccttcttcttcttttttttttttttggtttttcgagacagggtttctctgtgtagctttggagcctatcctggcactcgctctggaaaccagactggcctcaaactaacagagatccgccagcctctgcctcccgagtgctgggattaaaggcgtcgccaccaacgctgggccccatagatattcttaataaatgtttacaaatcctttctgaataagaaggttttaacctattattttttaccattgtgtttaaaatgctaaagcatcacagttgaacactgttgtattgtatttatgcaacaagactgatgaaatttctaatacactgactgataaagtattatcattctaattaagtaagtaggcaggaattcaatttagacattaattttgacaaaaatactaataaagacactgctagcatattgaaggactggttaggagcagtggttaaaattcattaagataacagtaggtttcattaatggtctaagacattggccatgaaaacatcaggaaggagcagtgagacatgattaaaaggtaactacaatatatggggactaggctgagagaaatacaaatagaaaaaaatctattgcacatttggagaacataggcaagcaaccactactaaaaacactgatagtcaaagagcatgaaaataattctgccagattctcgcatttctggcaaggatgtcatatattcctgagtgggcataacacatagtatttttaaaagcattacctgacctttgataggataaacttttttgatatttttattaaatgtaatcccccacagttactaatttttaaatagatatttagcgtaatatgaaaagacctttaaaaggatcaaatgttaaatctatatggttaaacatcaatcaccatttgaatagatatgaagatatatacacattatgaactggcaaactaattaaatgaattatatatgtctttacacagtatattttatatatgaggtaggtatttcaatgtttttgtctacaagagaccttataacccaggcatctattttccttagtaaaattcctgaatatgaaatagaattctgaggatgccatattaaagccgatgcaatatgttacatagggtcctgtttataagggcatatttccagaagtaacctggaatacataacagatcatcagttaagagcactgcctgttccaacaaaaaaaagtccagggcaagatggtttcagcgaagaattctaccagaaattcaaagaagagctaatagcaatattcttcaaattgttccacacaacagaagtaagaggatcactgccaaactctttttatgaggctacaattaccttggtgcccaaaccacacaaagacacaaataaaatagagaaatacagacctatttccctcatgaacattgatgtaaaaatactcaataaaacactggcaattcaaaaccaagaacacatcagaaagatcatccaccatgatcaagtaggcttcatcccaggaatgcagggatggttcaacatacaaaaatccatcaatgtataatccaccatataaacaaactgaaaaacaaaaagcacatgatcatctcactagatgctgaaaaagcctgtgacaagattcaacagcccttcatgataaaggtcttggagagatcggggataacaggaacatacctaaacatagtaaagcagtatacagcaagccagcagcaaacatcaaactaaatggagagcaactcaaaacgattcccctaaaatcaggaacaagtcaaagcgttccacgttccactttctccatacctcttcaatattgtccttgaagttcttgctacagcaaaaagacaacaaaaggagatcaaggagatacaaattggaaaggaagaagtcaaactttcattgtttgcagatgatatgatagtttacataagtgacccaaagaattctaccagggaactcatacagctgataaacaccttcaggaaaagtggcaggatacaagattaactccaaaaaaatttagtagccctaccatatatagacaataaatttgctgataaagacatcagagaaacattaccctttacagtagacacaaacaacataaaatatcttggggtaactctaaccaaacaggtgaagtacctgtatgacaagaattttgagttattataaaagaaattaaagaagatatcagaaaatggaaaagagcactgcctgctcttccaaagagtcctggcttgattcccagcacccacatggcaacttgcaacaattgtaacaccaatcttgggggatccaaagccctcttctggcttctgagggcacctggtgcacatctagtacacagacctacatgcaggcaaaacacacatacatataaaattttaaaaatgaaaatcaagaaaatccatacatttagatttcttcatggatgacaaagctttcaaataattcaacaatgtgaaaattaatgtactgtccatagacattaacatgaaagtgaaaatattaagttgttgtaaaaccccaagagccaaaacattaagggatataaagatacaaagaagaaaggaagaaaggaagaaataaagaaaggaaggaaggaaagaaggaagaaagaaaggaaaagaaaagaaaagaaaagaaaagaaaagaaaagcaaggcatgcattatctcaaaaaagagataagctacatgctgaacagaggaattatccctcaaccaaactttctataaatgcttgttgagggacttacatgcatagataaatgcatacccatacacatacgtgtgtgtgtgtgtgtgtgtgtgtgtgtgtgtgtgtgtgtgtgtgtgtgtgtgtgttgtgtatattgctcacacatataaaataaaataaacccataataaagcaatggttatttttctaaggaatcctcattcaacaagacttatggatgtctttttatgatgtatggattcttgtaaaaatagcagtaacaaaaatggtgattgctgggcatagtggtgcacaccattaaacccaacacttgggtgacagcagcagctggatttctgtgagttggaggcaagcttgatcaacagagcaatttctaggatagccagagctgttacacagagaaacccagattttcagtaagcaatttatagtaatcaattaacaggccctataacaagcttataagttaagaactgttatcccattttataggaaaaacattgaggcaccaaggagctaagttgtacagatgtgtatatgtgtgtcattatatagaagcttctattaagcatattcattctcagaaccatatcggttcattatttagcttgaggatggcttcatattttacagagatcatgaaatagtataataaactaactcaaaattgacttcagcatgaaacatattttaagattatacattattttctccataccctcccaagacacctaatcttgttaatgcttctacacccactcctcacctttcttcacataaggccaaaattctcacaccactctaaaatctacttctccttcctaacagaatataatgttgttaaaggatgaggggctgctttactgtcaggaatggaaatattaaatgattgtgtttgtaaatccctgtaattggacaataacatagtatcacactgctgaaagtatcacacacataggtaatgttaaatatattcgagtaaacatatcagttactgtttatcctgtaatcagcatgatactaaccaataaacaccacatagtaggtgtggaccactagcttaaagcattcagaatttcaacacataaaagattcaaagaaacagtgtgtttaagggcttctgatagtttattaagatcatagtgatattttagtatggaacaattttattactgttactacaaatatacaaagcacaagttaaaatatactcatgtctacatatgcatccaaattaaatgagttttagttttgtccatttcaaaaattcttatggaaaaggttttctttgagaattcataatattatgaaacattagcttaaagggatggattaaggcataatattctacatctatgtgtatatatatacatatatacatatgcatatacatctacagatatgtagataaggatgtttacaatacttctttcacataattctagagtcactcaatctagtcagtattttttaactgcaagctgtgcttctcaacattcatgacatgtaacagaatcattcattcttcttgtcttttgaaagaaacaaatggctttcggctgactctcatgaatctgacagtctttctgtctgagtcccataaagctgtctaagtgatacaaacataactggtttgcttcagaatattgagtagctattttctcccatttattcaactgtaaatacacaggcttgggaatgttgaaaagaatctggtcaaatgacattagcaaatagtctagctttggactcccaacttggatgcggtcaagaaaaaccatgaaacgagtgacctgtacttcctaaacttaaccttgcacaagaaaaagctcggtaatgattcttacatagaaggcactaattctgtaatgatacatatgaatgctcacatctacatttaaagtactgatatggctcttttcctatgacaaaattctctttgaataaagtaggttaactacattttctatgcatgaaatcagttggtagttgcatgaaggaagttcacatgaaaagctatattctgtccttatatgagataaatgatcattcaactttatctacaccttagatcactctagttagaaaggcttttctaatatatgtaaactaattacatgtatttggtgaggaagaaaaattgaggaaatacattttaaaagtgtaattgaagcaggagaattaaacagaaggcttcttgtttggcaatggcccatctgttctactcactatgcttttattgtaagtctatatcctctcatttaccaaatgaaaaaggtttacctaattcataagtagtaagcaaggtggcatttacaatttgatgtgatctcagtcatttggaagttgcaccttatatatgtagaaatatacagacatatagaaagaaatcataaattagaaaatataccttctactgccatatgcattacataacctgaaaagattttctcatcctgatgcaatctaccagtttgtctcagtaaagcaatgaaatatgaaattaatttattaccatccatgcatgtttccatatttttcaaatgaataacatgtcaccatgtactactagcctcgtctgtagtcttaacatataattcaagttttaagtaactacagtacccattcactcttatttaaaagccatttaaaggtcttgtttaaagacttccactggatgtcagaaattttgggcattgatgaattctataaataaatcatatttatattacatataaaagattaagtttcatttatagataatgtccaaaacatatttacaacaaaaatgaaatagaaattatctttaataaaatgatatttctcaaaataattcttgtactatattagaccctttttaattatataaagcatatacaatatgataaagagaatgatgtgggcattgtgatgatatagatattatgcttctaaagacttgttgaataaaggcagttcaaccctgctacagatagttgcaagaacccaggaaatgacaggcagacataaaactactaaatgagtcattggagagtaacatatatagcatgcctatgctggaaacactcatgtactaggcaggctgaggtaagacaatatcatatttcatgacactactcagaatataatgaaatttaaaccttaagaatgttattgtctgtgatttttcagtatttttagaagttttgacctcaggtaggagaaatcaagaaaagcaaaatcaaggatgagggatgactactttatacagtggtatgtatcccaatttttacatcttaatcttgaaacacattgatgacagaggttaggttgaacatgttttctttttcctgtaacaaatttccaatactagctcataattgaagcatttcaggttatttctttcttgatatttctaccacttctctgtttattaacatttgatgacaaatcccttgttattggttttgtgaatttcataccactagaacaatatcttctttccacaaatttcagttagcatctgatgataccctaatgcctacaatcttccactatatcctgctcagcttcagaaaagatacaatagcagtcacatagaaccgaatgaaggcacacaaaatacaatgaaaatgctctccttttattgttcttttttctgggtgctgcaatataacaaaactacagaaataaacacaaacaaacttttctatgtttatggctgtaattccaattttgagttttggaactaggaataagatctgtcacaacatattttaggtgactaacatttttgaagatacaagttgaatttttcatattttgtatactgtatctaaaaactgaatgctggtagaatttaggcaaaaagagccccaatatttctttcatactttgttgtaaaacaatgcatcaactcaaacaattaatgttttatttacatatgacatctttatagatacagaaataactttatgtctgaatgtgaaatcatactagatattgctccatgcatgtcaagatcttttggtataatagaatatatttgcttcctttctgtttcattaatactaactaatatttcaacaagaatatatatatcaggattgggcatgttggctcaggcacttaatcctagcactttcagggaagaaagtgacagatggatctctgtgagttcaaggtaagcctggtaggcacagagagttccataacatccatgcctacatactgagacctggtctcaaaaatgcgacatcaagctagccaagcacacataatgctttgggggtttgctgttttatatgtcagaaatcagcatagtacactggtgctggttgccatttgtttttctaaactttcctgttgagtaagtctaacccttctccactattagacaatagtcaacctgtttcattttctctttttattgattccttttattaacttctatattttgaatcaatatgaaattcattatagtgtatggtgtgaggttggggcataacttcccaatcaaattatttcaagtaatctagcctcaaggaaggagtttatataaagtccaggatgcaattttggcagatctaaaattaaacccagctttccaagtctgaatgaggtttcgttcttttgctgacataattaatatgcccttgtatcatgttaagctataaaatggttcatttaatcacacttaattgaatttatgattttatacttaattcagttttaaatcctgtaacaatactatttattctatcctctcccctctcatcacagtgtttgaggtagcttatcctacttagcaggtggaaacacttaaattaattcaacaacttgaaaatattctaggaaattaaaatgggaatgagatactaaacatagtatcactattagacagggaagagagaacacaattgaagaaataatatgcaatgatcggcatcagcatggcgctaggatatgaaacgtaagtaagacttattgtcattagacttcagattgtaaagtctcacattgataacttgcaggtttattaattgagcatgtttagttttaatatgtaagatgtttgaagtagagttgctaaaggttacatcatccaaaatgctaaataaagagaacaaacattgcatcacaatgttactgggaaaataaagtgtgacaatgtatgcaaagctatgttaaaaacagtatataaactaatgtttttttatatattacgtaaatataaaatgttgtgaaaatatgaactccatgaattagaaccatcatatatggatcaaaattttccatttgcttgatactttattattaacagagaaaataaacttagcaggcagttctttgtataagataataatttatcaggatgttaaaattctgcttgataaacagcacagttaaatatatgaatgtaaattgtaattaaatgcattataccagtacctattccatccatcttgtcagtataaacttcaccagaaaatgaaagaactgcctaacaccaggaggcagccaaagagaaggcaatcagtggctttattaaatgacgccaacagggagatgactcaggcttagtgcaggggcaatgaaaaggccttaaatttttgagcagacaaatgtacctttaattcagtttaataaaataagagacaaatcaataattaaaaggtacttgacaaactaatttaactgcatgatgagggtaatcaagagcagcattttggaatatcaaaatgtaggaagtgaatttaatgaaagaagaaacatcaacaaagctaaggggaatttaaaaatagaaatatggtatttaggaagaatatcatgcaattttctgcttcattcaaggctctggaccaggaatatgaatggagagttgaagtttccattttatgactgaagatttctctgtagtgactcttttgataactttttatgacttctctatgctttaattttctcagctatttaatggaacattaagctggcccacttgtttaaaaaactcagaattttataaaaattgtgaatgaaataaaaaaaatgaacaggggtccccagtttctacactatcaaattaagatattttttcgaataaaattaatatttctatcaccattatcacacaaaagaggggtatcttacagcaaaactcaaatgtcagaataaaggaacaattatttaaatgtggtatgtttctaaatttatttagcttaattttttatgaattttccaagatacccattaattaccaacaaattaaggctttacagaatgatactagatcctgggtcatgttttaaaacatttggagtcttgggaccctctaggtctccagatctatggatcaactttttttttcaggatactatcttttcctcccaagacagggtttctttgtatgtaactttggaagctgtcatggaacttgctcagtagcccaggcagacctcgaaatcacagagatccacctgtctctgcctcccaagtgctggattaaaggcatgtgtcaccactggccagcctggatactatcttattatgtaaaatatttataaagagtatgaactaagatgtaagcattaagcattaggtattgaaagaaggagacttcctctttgtaaatgactaattccatataagttttttgatatgattaatgtacaattttttcataatttcagtgctgattatcaaaactcataatggtatctccagccactttcttctccttttcagcaattttattagaaactgatactatataaataaaaagatgagaggtcttatcatagaagacttcttagttccacatatagcaatgtaattaatgtataatactaaaccaaacaaaaccatagttatatattgagcaactcttttgtactactgggaatagggtaccttcccagactatactctttaatcctgtttccttgtgaagatgcaaaaactaacagaatctatcctactctaaagttaaaaggaaaaacagtattccaattgctatgaaggcaaaagtctaacacatgtgtattttttttattttatatatggttatttagatccacagaacatcagaaggtcaccatacagtgaactggcggtaaggtggggaagtaagagggctttatgggctccacaccaagaagtttcctttttgctttcagataatggaggtcaggtgaggactgctacactgtcatcttatagaatccagctcactcacaagccagtgttcttcatttccaccctcatggtagtggagcaccacaggtgtgtagtcccagtatacctcatctttctggtatggctgtcatttttctgatgtagtatttatgcataagtttgtattatatatatgtatatatatatatatatattcataaacattatacaaaataaagtttacattatagtggttgtatattaagaaaacatgtgttataattcccaaatgctcaattcaaataaagggaagttgagagaaaaccttcaaaactttatgattcttttccaattagtattatgacaattccttgccacagaaaattatacgtctactatgctgacaacctataacactctaacgaaaaacttgaattatataagtgatgggcattctggaggcaggagcaatgcacagacagaaataatggtggtagaaatgccatgaatgaacagcaaatttggtgaaaagctgaagataccaaggaagtaactagaatcgaaagaaggaattctaggtctgttaatacttccttgttatttaacaacactggatgtttgttattgagcctaaatattaatacatatggcacaccatttaacaagccacacaaaagtgtccagagtttgaacaggcaatcttactgaacatgtgttgacaatggccgcctctgctcttgccctaagaaacctgcaatcatcaaaactgcctagttaagcatctctctaaggccttgtcctacagaggcaggtaacttgtactgaatgaatgtgagatttaaaggttacatgttctcacaataaattccactagatttttgttttctttgtcttttcgagtaggttcagaaaaaatgttttagttacattttcttaatcaacttaaggatattatacattttaggctgtcaatatgtaatgaacaaaatgaccttatacacagtaattgaaatagaaacttttcattagtgtttatagtgttcaattccatagcacatgtgctaaaataaaactagaatgtcaaaaagaaggctaatatgctctctgtgaaatgatgatagaaattctagcaatgccccagattttaacattatgcaatatataccactactgaaagactgtcaagtaagatatattacaaaatgtaacaattattctctaattattttgagaaaacatggtttataattaattacacatattcttgagatacattggagatatacaatctttcttactgtcttctatatcctattggtagaaaacattgaattatcagtgttattgattaacctgggctcctattttgccttgtgtggccaaaatgtcatttggcatcccctttccaacagtcaagataatatcttcaatcttaagctgttcatacacctgaattatttgccaactttttatattttacaattttgtgtgcccttttctcctcattttaggttgcttgtcatagtgaaggaaaaaaaatcatgtcaaatctctaggtattttataccattctttgtaaaaactaaagctttccactggcaccctgtccacacgtactcatttatggcaatacaattcaaaattggagttgttagagaatgtaaatgatggtggcaatcaccaagcaaaaaattttaaacgcaaaacttataaacagagggaatgcttcccatgttgcatgatgaggcataaatgtgcttctatttccataataaaatgttttgaaattatttttaaagtatgcacatatgactgtaattaaaatgctctgtagcattgtaaatccaaagtaatttagagaataaccttcattgcttttactggaaaactaacatctgtctgttattaaagttatgcagagcaaagaactcaattaatttcattccagtgctggttaaactatgtactcattattgaacactatgatgttaaaatcaattaaaatagtataacaaacttccagtaatttttctacaactcagtttatgtaatttcccttccactttcatccacaaagctattagttaaacagaaagatgaaaaataaaactctaagtttcttacacaattattcagattaaagaccattgattctgcttctgctgctgctgtttatgttatgcaagctcttcaaatccacacctaatttgctccctggctactgcagaaggtttccaatagccatgttatcccccaatttgatgtcctggtagtagcctgtacttttcaacttgattgtggaagttgagggacttgtttaactccctaatattctgaaaatacattcttttctaggctctaaaacaacacctgtttcttttagtctccttttcttttaagactaactttgcaaattctattaaactaaaatctacatacagtcattattcacattgtatgaaaaaattaagaagcaatggggattatgctaaactttggggtagcccaacttaactgctatgtttctgtatacgccccccccccgtgtgtgtgtgtgtgtgtgtgtgtgtgtgtgtgtgtgctttctgtgaatattcatctatactttgtcttacaagggtggattatgtttcttgacaatagcactgtagttcttcacagatggccatcaccatccagaaatggagatggattacatagccttagctgctttttgttgtttccccttttgttatgtagagaaccagtgtctcaatgtggaaaaacagatacatcaacactactgcatagttactaggtgttataacaaaagacatactacatttttgtttgaaaataaaaacaaaaggagcaagactttttagttgatcacagaaccagcatcggcttccttctccataaaagctaaaagtcagtcagagattaaataggaggagaaattctaagagataagaacaagagcaacatcttgcataagggaataattaagtgaaggttgataaaaatgacacctatgtactgtaaaaaaaaaagtactatgaatcaatgaaaagaaaaagtatctgaaaatcacatgcaatggctattgattgttagattgataataatccagggggagatttattctctgagtcatatggaatttttcttcttgtaattttcaacatatttgtaactaagaagctctttgacagtatacttgttaagtctgcaaatgattcaacacccaaagagattgctaatatgctttttgacagaatcagatttgaaattttgtagcaggtagtttggtaaactttaatcaatcaaaattacatttaataaggataaacacaaatattaatgttttttcctaaaaatgaattacattggcctaggatttgttacaaaccaacttgtgtaccatttatgttgaaaaataaaaacaaacgagataaagcttttagttaaccacagagctagcatgtacatccatagagataacattactagaaaagctaagacattatagccagtcatggattatatagaacagggaatgaaaataggagcaactaccattctggatggaataatcaagaaggaaaactgcacatatgtattgtgaagatgtaccatgaaaatatggacaaaacaaaaagatcttcaaatatttgcgtaactactgtgaaaagtggggcatctcagatcctgtattgtccccacatggacctgagaacttacaagataacagatctatgtattagtaaggatgacgtatttctagtgagagaagctcaggcactcataaaggaaggacttccatgttactgccgcctcagtaccaaagggagattaaattggatgatcctctcaagtctctttcaacaaataagattacgtgtttctatgaaatagtaatccaagtcatagaacaaccaccaattcaatatttcctaccattttccattctgttatttattcttaatgtctgtttggatggtaaataatcaaaattccctactgtcctaatattataaaatataatttgaagtttacttgataatcatgattggactcactgagacaaatttgtctgtatctttgcatgtttgtaaaatggctagttgaatttaggatttcagtttatgataagagactagccatttcctcataaggagttagggaacaaaactcacatcagtagattgagctaaatagctacacgttatactgcatagccccttccctcacaatagtattgtgatttggatatagacatctatttgtggatgtatatgagtgtatatgtaccgtaccggtatacatatatacacacatatatatgatatcacaataaaggtgaagtaaaacaatagtgaggtaacagcaaaaccatttgaaatagaacacgttttggaatattggcaagcttttggcaggatttcaagtgagaatttacacttgtttgtcaacaaaaggaaaaattcaagaagaacagaaaaaaaagaaagaaaagttcatggctttagtgacaaaaattcaatagaaaaagtagaaatagccaggtagtggtggcaaatgcctttaatcccagcactcgggaggaggaggcaggcagatctctgtgagttcgagaccagcctggtctataagagctagttcaaggacagcctgcaaagccacagagaaaccctgtcttgaaacacccccccaaaaaaagaaagaaagaaaaagtagaaatagaaaaaaagcatggaaataggatataatacaacatagcattttttcataataatcattgttataaaatgttggataagtcaaacatctagaaatagacattttcatctggtatgggggtatactactacaaatcaacagaaggtcagtcagaagttaattctgcgtttgaaaattatgtcttgctgctcattggtatctgatgattagtacattcagttctctatctgacagcctacaaaatacaaataatatccattttcttcatccttttttcttgttcatgcagcacatatttatcttaatgagtacatggatttttaaatgatagctgtaaaacaaaatagcaccatttgcatttcagagtaatcagtaatatccagcttgaattttgtccagaacagaaatggcgctaaagagaatctgtctcttgctgatcagttcaaaatctgaaattgcagctttaaaagtctgcttaaaatgattattaaaaatgcttcttgcattagatgctaaaatggcagaaagacctggtttaatagcatgaaggcaaaaataaacaaagttagcttttggaaagactgcagaccacaggactttattctctgatcacttgggacttgctcaactccctacaatcagatactaggatttcccagcctactgaaactcttctggtagctccagctatgtgacctaagccagtaactccttttttcttacttgaaatttcttttctttgtgttcttttttctgttcttccttccttaaactctttgatctaatgatctcattcaatcctatcaacctaattattccatttgtatggacagtttcaaaattaggtaattatcaacaagccctcttgtctaagagaaacaccacaggttttgaaatctagtaggcaactctagctgtactctgatcttaaaattatcagggttaagaaaaataatttctaattaaaccaagatggaccctcacaatttgttgccactcctctccgtgtgtgtgtgtgtgtgtgtgtgtgtgtgtatcaagacacgaacaaaaatcaggagaaaaatatagatacatgccaactgattcaggctcaagaaaatacattttgtcttctctatgtactttaaatatagtactgctaaataatactcctttgtactttaaaataaaactagtactgctaattaatactccttaacaccagctaaaattattctacttcaggttcttcatgcttgggtgattgcaataagctaacaattagtgtctactactttagtttttcatccaactattttcttcatatttctcagatgattcttttcaaaacaacttctaatattcttcttatacttaaaatcattaaactacactcaaacaatgatcatataatgcacacacattacagatccttaccatactttactaaatgtatgatagagactgaactgaattagaacataagagtagtgctataaatctagggtttttttttctattgttgccacaacagaatatctcatatttaacaattgatataaagacaaaataatttctcatagttctggaggctgggaaggtgaggttcaatgcagcgatagcttatacatgtggttgaggattctctgttcttctaagatggcaccatattgctttgtcttccagcaggatcacagggtccacaggtgacagataagcaaaagagaaggagccagctccttagacaactattgtaggggcctgaatcttatccatgagtaatcactgtcatgacttaatcaccttataaagataccacatctgaacatcagcatcacactggtaacaaagtttctacagattaatattttgggaacattcagtgattaaataagagtaaattgaaatacaatcctttctcaagttcagggccattttaaatgattgttcgtaaattctgtgtgcatagtagtctttaaatattaataataatcatttatgccaaaataatctttctacatcttaaaatggaatgacttccccaaacattctattcactaaatatgtaagaaagccctaaatgtcatgtagacttttaaactacattaagctcatatgtctgaaaaacagaggaatactatagtattgtcagcaaactagagacaggctgtttatagcattgggctagatacagcagcaaggttttcttatttccaacctagttctttattcaatagatgaagaaaaatcaattagcatactgaattatttgtagtgttgttttgacataaggttttattttttatttttattttagaagcactcttatttccatatcaatccccctatttcttcgccctctcatcctcctatgctccccactgaccccccccaactcactccccaaggatagtgaggccttccaccggggaccatcaaagtccaccacatcatttggtggagggcctaggtcctctttcttctatctgggctgcaatagtatccctccatagggaatgggcttccaaagtccatttttgctctagggataaacactggggagaataggacgggggaggagaataggaaagaacaggaggactgagacaggggaagaatagggaagggcaagaaatgtgatgacttgatagagggatacagtatagatttggagaaaagtctggcacaggggaaatgttcagggatccacaggaatgaccccaactaaaaatctaggcagtggtagagaggctacctttgatgcccttcccctataatgagactgatgactaccttttttccaatctagagctgtcatccagtagctgatcgaagcagaattaggcacccacagctaagcaccgagccatactcatggaatccagttgtggagagggagtagggatgagcaaaggagtcaagaccatgctgcagaaacccacagaaacagttgacctgatctagtgagagcatggagatcctagtggaaaagctggggacccagcaattgaccaaaccaagccctctgaatgtgggtgccagctaggaggccaggacagtctaagggacataaggtttttattgcacaagatacataaatttatagacaaaatttcatgaaaaacttataatctacattttaaaaaagtgaagtagggaagaaagaaagatgcataggaaaacagacataactgaagactacgagggccagtgtgctatgagtataaattcaggaatgagattagtgaggatgttggataagcaatttgaaatcatcaaaatctaaataaattcaaacctacagattccagaaacttgggaaggactagaggcaactggaaaaaaacactgacctatctgcaaaactaggttctgatccttcctacactcctgtattgtttgagatatttgaaaaaaatattgaattggtagagttgaaatactctcatcggtaaaaatgagaagaaacaagagaaaaatgtcatggtaattctagcactatttatatataatctaagactgaaatgcaggagctctctcttaagaaatgaggacaggaacttttccaatgacatgagagacagtgacattgagcagtgctgtcacatagaaaggaatagatgaaacctaaaagccaaaatcgattttatgtaagtattatattttgcacaagaatcattcaccagaggcaattcatcatatagtatatgtatataaaggggataaaagaggcatgaagacaaatgttttaagataatactatcccaatcatggctcagagctatctaggactagattccctggaccagtgtacatactcagagctagaaagtaggctcattcttcataatgaatgatagcagtatagaaacaaaggagttttcattttcatgctactctctaatccagactttctgattttatattgcggttcctaatattttagattttaggctatagaacagagtaacacagaaacttctaagtactcaatttgatgacatgtgcataggcctatgaaggatagccaaaccaactgttctgtaaaggagacaacaattcacaaatgaacaacagagaattcatggtgtcattgaagtttacatagtcatcattatacctgcaaagtaactgatttcacacatctttcctctgaaaaagatttttagttcggctggcaataatccttgcaggcttgtcaaatgcttaaaatgaatttaccagaaaaaagtagcatctggccaaactaatcataggcagttgttagctactttactgaaaatcattggtagaaatgaccaaaggaaggggacttttaaaaggcagcaaattcaacagaattactattttaatacaaatttagtaattaatctccatgaaggcagacatcagtgttacaaacaacacaatttgccgttaacttctagcacacagctattcttcctgtcatcagaatcaggaagggattttaccaacagagaatagaacagtgcagttctttgagggaaaaaaaataggatcagttgttcatgaatcttgtaaaaagagagttcagaggacttttaaaaacattttcctccttttatttaactggccaaatggtacatcatattttacattttatataatgtcaggcagtatagagctatggcaccacctattgtgatactatttaatgctgacgggaaatgtcaagtttattatgtactggaggaacagcacctggaattcagtgatcatgaaaatgcaaatggtatttctttcagaagttacttctgagatcataaagcaataataaaatatttgttgcagcatttgccaatctattgaatataaattaacaatagagtacctatgtgtctgagacagtagtaggattatgagcattaacaatactctttcatccagtggccaacaaattgtgataatggctactagaacattctggctggacatcttcagaaaagtccaaattaatccctccctttcttgtctccgtccatgagctcttcagctgcctatgctctttccttcctgccatgctttatagaaatgcaagtagacatcagatgtttctgtcatggtcttcactaagttaggattctctaaagggagaataaccctaaggtattgccaaacaatgccagatgaggctacttcaggtatttcaccatcataaatattttaaagtggtcactatgatttagaacttagaatgcatgaccagtaaaaaacaattaaaacattacagtggaatacactatactgtagttttatgaacagttctttatagtcccaaactcttaaaaatacaactccaagaattggatttctgaagaatcccacataatttattatttaaaactttaatgtttcatgggaaaacaggtttagaggcataaaacaattaagttattttaaaggacgtctttaccattaatatctaaagcaagtaaaatatattagcctagttcttcacatcatgaagtccaaagggataaatggcaaatagtagacccttccttcatcaaacacaaggcaacatactccaaagatgataaatatataacttcatgtttctttcagtgtcctaaggtatcatttcaaaatgtagcattttcattgtgtcactgtgcctgcatttcaactccaactttcagtatgctggaaagtgaagagacagacctctgactatctctggtaactacataagctctatcaccttatcaagttcaagattcatatctaaaaggaggtaaaaaaaaccatattttacctcgtagagtgtgtgtgaagtacaaaggagataacacacaggaaaatacacttatcagttgcctactctgctaaatacttaaaaacgcactgccattttgttctgggcactgctagtttactttactaatctgtttatcacccattctcacttttaaaaacgatataaaaatgtatatacacatgatagcaatttttctaagaaagacacatgtctagggacagctgtccaaatatgccatgcattataatagtatgacagataaaattaaatgcccacatagctgtagctatgttcaagcactctggtgctctctagggatgtacaaaatgaaagttcaatgcaagatattacacttccatttgtggtcagtgcaagatattacacttccatttgtggtactcaggaaaacgtacttcaacagaatgacaatctacctgattaaatttcagctgtcagagaggcatgtaggggtatattctgtgaataatgaatcatctgtagaatacagaccttagtagctttaagagacattttaaaacccaggaacttggtctcagaacaatggctttggattttgactttcaacggcagcatgctcagtaataagcacaatgggaaagtgcccttatgatgcttgtgttaactcattttggctctttattgcctaacataatatttttacatgctttattttctactgtgatttttcaaccagtacattctgaaagtggaaaaaaggggctctgtgttacttcttaatgatttagtgactacagtgtttgacaagaaaggtgctagggagagaggtttcttcaagctatgatgatagccaagttatttgcccttttatacatttaaactgaaagaatacttctgattgtcacttcttttcctaagctacatcaacaaaaggtaaaatgccatctgtcctggtccctttgctgcaattgaaaaagaagtctcaagaaataatcaaaaaatttcttgattgacttattgcactacatgagataataaagcagaggaaaagccagagttacaatgaattcaggtcaagaaaagagaaaatgcttatattatacttgtttttaaaggaaaccacaagttgcattatttttttttaatttgaaaaatatgagtggaccttgtattcagtaaaccaatagctaaacgttggtatatcacagaaactaaatttccccaagtacaatgaccatctgtaattatatgcataaatcaggtgacacaatggacaggagtaagaaaaactgggtctagaaaaaagaaaaaagatagtaagtgaaatcatacataacgaggttgattcgatttaaagtcattatgacatgaccccaaacaatacaccatgtaacttacagggaaaaaaaaacttcttgagaaagaatgcttcctttgcattgtatagaagaaaggatatatgcacatttacccagtctcctctcctagttctggaatttatgtatcttttcccatcatgtcatgctgctctttgttttcgttctgtcatactctagtttgctacttctcagctcctagggcatactacatagtttctgcctagataccattttcttcttgattcccattacctgaaagtcctccatgttgtattgtctgacattccttggccttccctccctccaaactaacattagagtatcttccatacttctcatatcacttcccccaatgcctgagtacatgcatatggatatactcagttcttccgtgtgcctattggatgatgaagacaggtactatatcttgtagtccaccatcttggtcctaattgttaatgtttggggagctgctgttcttaagatgaggtaaataataaattacatatggaagactaagatactaagctacaaagttttctctatttttttcttttaaaggaagtgaggcaaagtaactaagctaaatttaatctttcaaattccttaggtgataagttaaacttcaaatggactcataagcaggtatattgatcagctaggaaaatcatacgtttaaaaaatatagccaataattttaaggttttaaaaatgtgtgtgtgtgtgtgtgtgtgtgtgtgtgtgtgtgtgtgtgtgtgtgtgtgtgtgtgtgtgtgttctgattgcatgttagcctgcatgccaggagagggcatcatatctcattatatatggttgtgtggcaatatggggctgctggaaactgaacttgggacctctgagatagtaggcaatgctcttaacctctaagccatatctccagctcaggacctattcccaatcttgagctgacttttgagaactcaatccccaatcttcattgcttaaccgaaccttgatgcagggggatgagctcagtccagcctcaacttgatatgccaggctctgttgacaaacatgggaggcctgtccttttctgaatggagatggaggaggagtggatggggtgtggtagaagggaggaaacgggaggagaggatggaggagaggatgtggttgatgtagaataatttttaaaattttaataaaaaattacaattgtagaaaagtctttgctcttttgccaggggtggctggtggtggtgaaatcagattgtgattcaatctataatcccgatttaagatgaaaacatattcttatatttggtaatttaaaacattttagttctcctaagtagtaaaattggttgattttataataaaattgttagactgatgagatgttgaatatccactttgaaaactatagtaagagttggctgtgatagtataccattagtgcctgggaggctgatgcagcagaaacatgagttcaaatctagactgggaaaagcagaaagttccaggccagttagatttacataatgagattgtatgtcaaaacaaaacaaaaacctgtggctgcagataatttcaaactgagagcttaactattccattctcatggcattcactaaactttgggccaaattaactagatatttggacataatgttgattcatttctgagtgtctttttggagccattactcaggtgctagcaggaagtatttttgttcatggcttccaaggtaagttctattttggctggaaggactaattagattgaaaaaaaagtttttgttaattttgttaatcaattatagtgacttagttaacatttgtcaggcagtttctataatgaaggaaccacaatacattatctgcttataatatataccataaaagtagcatatgctaatttgaatgtttactacatatttgattacattcatagccactattagaaccacagtttctaaatgggtatgccaatctttagcccagggtgacttctcgaggtgaattatgaaccccaactgaaatagtggatttgtaatgggactgacaattttaactatagcagcatgaacaacattgacgataataaaatccttgcttagatataactcacacaaaaagtaaaagccagaggctatgaacagctcagtacatttaaaccatttttcaacccatttgaaatccacagaattctatattcctttccaagaactacctggtagtctttcaaaattctgttttgtccgactaaaaaaattgtatacatgaatatgtcatatgactccctgtgaaacatttatccctttatcttcatctaataagagtgccagtgaaactttcatgaaataaatgttattcttgcctggccttgcttttcatttcaatatccctgggaatagaggtggtcagtgaatcagcagaagtaataatgtgtcctgaagatgcttattttcaaaggctgttaaagtgacaaagtattcgaaagtcgccctccctggggagcagaaaggtttgggataggggatccttgaggagcaggggaggaggggagggagaggtaactgggattgtcatgtaaaagaagctagtttctcattcaaaattggtttaattacaattataaaaagaaaaagaaaaaagaaaaatcagtgtaaataaaagaggataagactgcttcaaaatgatctaattaacaatttgtttttcttcttgaatgcaaaaggagtaggtgctattttttttcatgaaaataaaataaaatgaaataaagactttggaaaaaaagtactttacccaagaagttctagcaagaacaataaagatggttgctattttatttgcttgtttatttaatgatgctagggatcacaccctactgagccacaccctaatcctgttcttaactttatagctaagggattacagtactcatccatctacagccacaaacattgaaccttttgatagctggcaataacaaccctccagaaaacattgcttgcctgtgtcagtgactgttcttgcctgtagttaccctcttcaagtttagtttcacaaatagaataaaacagaagtgatcaaactcatcttaactgttacggtccacttttgtaattatatatgacagactgaagtctttttccccctcttagctcagatagttgcttaaagttaataaatttaaagacaaatacaatcttaaaaatcatcttccaaattgctgtgtttgttacataaatttcatattttgaaaagcactacaaagctgggtggtggtggtggtgcaagcctttaatcccagcatttggtaggcagaggcaggtagatttctgagttggagttcagcctgaggtaaagagtgatttccaggacagatagggctacgcacagagaaaccccgtcttgtaaaaaccaaaactagcaaacaaacaacaaaaacaacaataccccccaaaacaaacaaaaaacactataaggccagagtcaggcaggacaatgaaaatcatcaactcattataattctttgggattcaagaacaattgattatagatatatttcttttcatgagtatgactgattttccttcaaacaagataatgttcacagagaggacagcaactacagaaaattaaaatgcactttccaaaatatttgcacttcattatcatttgaaatcacagtatagcttaatatatacttctacatgataactatttcaatggaaaataattcttagagaaataattagtttggggagaaaaagagatgccgcacaaaatacaaaaatgtgaattgtttaacctcaccaaaacacttaagttttcagacttagtcaagcaaactaaactctttttttgagacagggtttctctgtgtggctttggagcctatcctggcactcgctctggagaccaggctggcctcgaactcacagagatccgcctgcctctccctcccgagtgctgggattaaaggcgtgcaccaccaacgcccgtcgaaaactaaactcttatactttataatttaattgatgatactgaacctcagatgatagcacacaagccttgagcttcattatcttattttctatgaacatgcgctgtcatactttgctcttcgtcaaattcatctataacaccctaaaagtttagatgtatgatgtagccctggcatcctagcttcttttcctgttactgtgagataaaataccctgcaggaagtaatttaaggaaaagtttttttttttcccctgactcacagctcatgatctagagcatcatggcagtgaagtcaagggagaagctctgattagttggtcacatcacaactacaatcaaaagacagagagataaatccatgaggctgttgagttccctttcctgatttacatattctaggatcctagccagggaagtgcatcatgtagagcattggttttcaatgtgtgggtctcgacccctttgggaagagggagtcaagctaccctttcacagggatcttatatcagatagcctgcatatcatgtatttacattgctcttcataacagtagtgaaattgcattcatgaggaggtagcaatgaagataattttatggttgaggtcactacaacatgaggaactgtattaaagggtcacagcattaggtaggttgggaaccactaatctagagtgtgtgagtcttcacaacggaattgaagtaatcaagacaatctcctacagccatgtgtagtggtcaagctcccagtgagtctagattctgtcaaattgacaagtgacactaaccatcatacttgggtgccagtatgttctgggaagagtgttaagctaatatggtttgcataggagagacacaacaatgggtgcagaaattcatataaagcataactctaattctaacaaatagttatcaaaagaaactttacatatttaaaaagaagatacacacagctacaatttaaagacaccaggtctcaatgctaacaccattaaacaaacatggtcattaatgatcacacccttttagaaggtggacaaccgaggtgttatttatttatttattattaagttacataagttaatgagagtggatgactattctcagtaaatggagaaagaaaaaccaagtggatgaaaaccctaaattttaggaatctaacttaaaaatcatttgtttagttttatattttctgggcatgaatgcttgccttcatgcatatatgcatgtgcaccaggtatgtatggtgtcctccgtgactagaggacagtattggatcccttggatcaggagttatggaaggtagtgagtgagaagtcacgtgggtgatgggatctgcagctgtgtcctctgaaatgcatgttttcagcactgagccagctctctagcccttgatgtaacttttatgcctttaaaagatgacaatttgaaagtaaaactgtttgtaatttgtatgagttaattatatatatatgtatatatatataattcccacaacatattaattaaaatgtagaataaaaaagctattagtggtatatcttaaatttataagtcatttatagcttttctaatttttctaatataatttccgaactgttatagtataaaatcacaaaatacagtttttaaaaccttagctctgattaattctgcaatcttaacacattttttttgaaaaatcacacaatcttcctttctatataaccatgcttaatactgcacatggcacttactaagttctgagataaaaactagtgattattactgtcaattataggcatcagaaaatgcataattaaatgaagcaacagaattcaagataagcatttaaatctaggcagtggtagagaggctannnnnnnnnnnnnnnnnnntagccatccctctaaactatataccaaaaatatgcttttgatcatttagtttacgatttttaatatatatcttctacgtgtttctaactttttaataaatcatgtagactatccagttaagtactttctattttttccttgcttccatgtttatgtatattcaataccagaacattatgagatactgggacttttgattgcaggccaacaattcttctattaaaaactagagatgtcattcaaaagaacattaccttggggctgggatctgtattcagttaccagttcatttctcagtagtattaggtggctcaccgtggatgcatgaatcaagattcacaggaccagtctcaaaataggttaatgtaactttattcagggagaatgaacttacacaagaagtgagtgaccaccaagttccagctccaacaattcacccatgctgctctctgtgacctgacccagagccacctgtccccaccccagacctaaaacccactcttctccctggcctgcataggtaaccacgccaaaatgggcgtgatcagcgatacaggtgccagcggagtgggtatcttgctacagctcacaactgcctatcagtccggtggagggggatttgatgatgccctctgatctctatgagcatctgcatgcatgcggtacatagatatccagaaagacacacacacacacacacacacacacacacgatataaatcttcaaaataatacgaacttctatatttctaaaatattatttctagaaaaaaaaaacacccaactgaaaagtatgtaaaaatgtgtaaagaaaataatacaagttaatggcattatccaatatttcagaaatatttatgatttaaaaatgattttgatttttacatttatttattcagatacttcagatacttatttattatttggtgttggatattgaatacaaggtcttccaatcgctaaacatatgtcaaccactgagatgtaaccccagtaactgaccttcaattttaaaatgaatctgaacaaatataaaacctgctcaaaaatcaattgaaattaacatccacatataagcttaagtaaataaattgttaaatatgtataacacctttttctgaaggcatttccacactgaacatcataattactacagagaataaatactaccatctctattttacaactttaagatatgtacaaatgagaaaatatgcattgagatgttaaatgaacaaactatgatcaagcaaatggctggatgacaaaggtaaaactagaatttacatatgtaattaatcctatccctggacacaccagttttttagtatgtttcatttataggcagctataccagcattatttgctaaagagccattagcttcccaaatagtactgatgtttcccataactactttcaatgagtctgcagatcaaaatgacagttcatttcttcctgttttacatgaaaggctactaaggaatttgattcggatatcaagagtttacattttccatttactaagatcctctcatcaacttgtgcaatccaaaattccagaaggaaatcacaacaacactgccacttcttataattggacctttgtgttaaagttagtttgaaatgtataaaaactagagaatataagcaactgtttgggtggttctgtaattttcttgaaatccttatacctctatctccctcgacaacacagaagagcaacaaatcactaagggagtgatgaaaattacagcaatggtaaccaagactatggtcagagtgccgctattttccacataatatccaattagggtcacaatctctctcccatttatgatatgactcctatggcaggaatggttgctgtttgtgattctaccttctgcccctaccttctccttccactttgacaatactacttaacatcagttatttaacctgttacatcaaacatgtcttgacattttcagtaagtttaggggccaaggaagtgaagataactgatgaatgattatctgacttataaggaactacttggaattcataatgagattagactgaccaaaagttacaaatattctatttccagacattgaacttaaaaaaactgacagcagcaagaggttcttggtaggagttttaattcactgtgtgataagatatgttaggattcatcagacagaatcatattgaaaacaactagaataaagacctccttgatctttacttgtatataatgtagttgatggattttgttcttttacttagtaaagaaagcataaacatcactctcagattaaaagatgctttgataaaatcctaaagtgacatatagcttgctgaaaagcatgaattatttacaataatgtcagatgaactttgacgacacttacctatttatatttatacaacacatatgataattttaatgaagcaggcataaagataaaatgatcctttgaattaaaagtagtatctgcctcacctttcataagctatgacacattttaaaatcatgaattattacctttatgtattttactgaagtttaactaacatcagaaagtgcatgtaggtgacctggttaataattttgaataaactaaatacatacacagtatctagatcaagaaaaacaacatgacccgtacctctagaagcctttattttaactatgaggatattttcgaaagaaaatttttctcttaactcctttaatatctgcagacatgttttaagaaatataagtaatcataaagtcccacagtaggtttaaagacagtagtaagtttcaactgatgctgaaaagataatcactgagattatgatatcaattattattgagaattattaatttggaatagagccactaaaacagacactctgtatcaaatgtatgaaatgaaaaggtcagacattttctcatccccaagagaaaaaaataactactgaaagtcagaatagaagcctttctatagaaggatgggagtaaagagccacacagagtacaaaattgcagggaaatggaggtgacatttcagtttggaaaaaaaaaggcacggaagtctaggctctgacatagtcatggggaaaatggcataattcgccagccaaaaagcctccaggatacaaaggctaaggtgttctaacgaataaaagttaaaataccctgacaaatgagctatgtaagcatataagaaacgtttgttagaggccctggagtcactaatcacctgcatctgtaaggtgctgggcttgattccaagtactgcaaagttaaacaaatgaataaacaaacaaagaatgaagtacattacacaaaatactcaaatccaaataatgtatcatcaagaataatatattaggtatttaaggagggtaaatctcaccgtaaatgttttcaccacactttaaaaaatcagcacacgtttcttttagagctcaaattctttcccttattctactttttgttatttaggttgttattttacattctaagataagatctcactatgcagccaaggatgggtttgaacttgcatttcagtcttagcactggaatttcaaaaaacacctggcatatctttactatcaaaaaaaaaaaaaaaaaaaacgtggcttttaaacacacaaagctaactttgtaaaaaaaggaaatttgttaaaaacaatgatgttttaaaaatatttggttccataaaacttaatgtagcattctcctacatgttaaaatgtttatggtattcacaaaatagaatagaatgtctgacaaatattgttcaaattatttaaagcgttatacacacaaaaacccgagagaatcttagcaacaatttaaccatgtttattaaaacaatatagtattttatgtactcagtgttattcagactactaacacttaactaaggtcaaaacattctactatgctagtaacaatatggttcaatgaataaaggatcgtcttgcagccaaacctgctgacctgagtgctggccaattccccacccataggatggagaaaactaacttctgaaagttgtcctataacttccacttacacacacacacacacacacacacatacaccatgctttccacattgatataacatgactctgtctctctaaaagaatataactcaaagtctaaatctgttaagaaattgaacagtttaacattttctcacatcttcaatcctgtgagtgtagacagaggtttcgtgcccataagataagtgctctaaaaacactagaatttactcaacaaattcatatagtttttaccaaggaaattaacaatgggtaataatggaagcaatttttcaggcattagaataaagacagcaactgcaggtgctactactggcctgagacagtcctttaatgctcctcataaacgtctaagtttggtgagctatacaagttcagttctctatcatcaacccaacggttttcacttttaactttctcattgtaagaactgaactacagagtaggaaatattaagccacagtgtcatatattgacttgtctagcttactctctttatagtagacagtaagtaactaactaaccatggaatatttatctgattttgaaaaatatccactgcattaaaatggaatcagttatttaatttcaattttctttattgagcacttagatgtatctgggtcgttgtgtgtacactgtgactgtgagcccaatcaggaaataatctatgaatctaagaagttaatttatacattgcatatagaaacaaataaataaaaatacaaatgaggaatgtgatctactatcaataaggctcaaatactgctactgacaacaataaaggaaaggctaattctttcctttctcagtgtttacttattatgctctccagtatcttggtgtgagtcgcaagtgtgaaaatatggctgaaatttgaacggtctttcatacagctgtgtgatcatggtcaatttcttcatcatttgtgggctcagtttcttccactactggctctaacatttttcttctttcctccaacttttatgctctgttattttacattcattattacttaatgtttcttttctttaaatgagaaatgggtatttattggggaacacttacacagaaaaatacaaagaaccgctgtagcgcttctctgccagtcctacaggacacggctgaccaaagagaaagacttgcacagcggagaccatgccttaggctttcctctttccacttatatccgcctgaagccacgcccaaagggggtgtggccacagttacaggcaagaccactacatcagtgctcaattttcaggaccatttttataaaaatatgcacaatgatagttggatttattcggaaattatttgagatgacttaatctattagagcattcacctgtgtttcttctgtctttgatttcacttaaaaacccatttacaagcaaagcttaaagacttaaaaaacctcacaacagactttcaactgtcagtacttcattaggtgtgtatgcttatgtcagtatctgttctcaatgactgtgaccaccatctaaatttttattcactattaatttagtcagctgaatagatgggctggaaatgagcttctctgtacaaatcccattctcatcctgtctctgttgcaggtgtgtacacctgagaactatttacttgaagcagcttgtcgctgcttttaccaagtaagactttcccacattggcacttatcagtatctaatttagatacacactaatgtaattccagtgagacagagaaatcttactcctacatagctgcatttattacctcctttaatatctgtatagagtacttccattacatactcatctataattgttatagttattaacttatatgtttttgtgtccacactaataacatattaacctaaatttctgattctctttttcttcctatgaaatcagcttactgtcttgtgtgtgacttccttaatctaatacagcttgtcctgttcttcttagggttgtattgtgtcaatattttatgtttctgtatattatagattagctgaatataaaatattctccaaaatatatccacaggtttttgtttaacatttgattttcagctactgggagatggtagaattgtgttttcttttttctttttcttctttcccatgacacttatagaatcttaaattgttctaattttgctttcctctaatttttctctattcaaatttacacctttaattcttagaatttccaaacaagattacttttaatgtgacatttcaccactacaaatcctgagaagaaatcagtatagtcacttagcaatacaacatagaaacaagacagatagcaaaaggcaaagctgactgagaaaaatataatttaattcataagaaattaacattgttcatggaaaacttaactagtttttatattgtaagatggcactaatttaaatgaagtgaaactctttctgatttatgtaaaaccttaggattaatagtgccttcaaatacattaatataattttcctgcattgaatagaatacttttaattaaactttactaacccttttggtttaatccctggagctaacccataaaacagtaaaggttttaaatcaaactataaaatcctcaaagctaaaaattaaagtgacagctatggtgaagagagtggataaagaattcaccaaatatgtctagtcaattattaatacttcatatattatatatctattatatataaacatatattcacatgtcttgtatttctattgctgtgttaggacaccataatgcaaaccagcttctaatccatcactaaaggacatcaaggcaggaactcaaagtgagaacctggatctgggagtgctgcttacttgcttgctcagtttgccttcttataccacccaagaccatcagaccagagcttttgcacccactgtgagctaggctgtcacacatcaatcatcaatcaaggcttgccacaggcaagctaatggaagcactttctcagttaaagcttcttcttcccaaatgtatggtttttgtcaagttcacacaaaacaagacactgtagcacacatgtataatcattaaaatgaaaaattggggaaaaggtaattgtgtttataacaggtacgtttttaatgtgtgaagatatcaaaatctgtacagctacaatattttctttcttgagacacgcttgtatgtcagtcactaattaaaggatctacagccttaaattttagaacagaataaaataatttgacagtaatattttattaatgtcactgataataaggttatatcatataccatttgcttctgaacttcagatttacaagaatttatgtttggaagaaaacactgtactttcttactctacttgcttgcctcccctgtcagagcaataatagctaactaaataactaaacaaattcaaataaaaacagaaccactttcaaaatctccaggcaatgcttcataaacttctcccacaaaagtacccctaatggaagcgaagattgaacacccacccctagggatctgctgcaagtgtgaaatttctttgaagtcatctgttttattttaaaaattcatgtggcttttgcattctactctgtaatatgtatctgttttaatgtaaaaatgatgtgttttcttcaatatctttgagttacagagctctaggaaaatatgctaagttgataccaaaggcttacttctccaagaaatgcataattttaaagcttagctttgtgaagaataaagataattatacaaatcacttcattatcatttgaaatcacagtatagcttaatatatacttctacatcatttccctccattatcaggaatttggaggcctgtgtttttagtattgagtgagaatatgcctgttgttggccattctagacagaaaacatcattttcttattaggtaagtacccgaattttaataatcacaaaaatagatactggtgctcatacatttgttcattgtatgtgaaatgtagtacattcattaactcaggttttgcattattcctttacctccaatttttaaaaaagtgttctgttttttaatagaaggggatcatttcacaagacaatccattttcaaaagtaaattaattatatagtgttgatctatttttttatttccactgtgagtgtgtgaatattgtacatacagtatatgaaacacagtaatgaatgtgaaagaatttgactcaaatgaccctagaatttatggtaaggaagcaaagacaaattactctcaaatattaaggacaagtatttaactataaataacacataaatcgcttgacctttcaccatttcttttcttcctgtagagactaaacttaacagtattttctcctgtggctttggtaacaagacattagaaagaaaggaaatggattttgaacagtgttttgacaaatgatagtcagttgtcttagaggacaaggcaggtgagattttcaggcaggggatgcagccggaaattgtacacacagacaggattattataaaggaataaaaatggctcaagagaatatatgtctgggtacactgaaatgagaactgggaggaaatgaaagtgggccgcaagcaggcagggtgtgcttaagaagtttttgagttgagaactctttgaatttcacagggggagaaaagaactagtcacaaacaagtggagagtggggattgctgcagcccaaagagtgagacaggaaaagggtatttggcaacagtcttgtgaaaccactgtctggatcaatacacaaatcaagtaatccgaaaaaaatggatgaatttcgctgttttaatagacagaggaaaggaaagtgatgaaactgttaaagaaaggtatgaacggatttataaaaaaaagcccagatatgaaagaaacaaagctgaatagaatgcatgcttatctgaaccttgaaggactgtaagacatatttaatagttttcttctaatctaacaatcaaaacactgcaatgtacttactggtgcatcaattcttaacagtactatcactatcagttctaatgacagtagtataacaggtgtgggcttactaagattttactgtatgctttgtatgctagtttacttatttcatcttactgttattgacattcactgtgattttctagatggggacaagaaatcactacctcggtgctctgaaactagtaaataatacaattagaattagaaattcatgataacttaaaagtttttgttctgctgtctgcctttagcagttgtaacaatggctaaaagtatttggtattaatgttttagaaacagttgaaaaggttttgttctggtgcctgcatttagcagcataacaattgctaaagtagtcgatattaatgttttagaaacaacttgaaaggttttgttgtctgcatttatcagttgtaacaatggctgaagtactaatgttttagaaacaacttaaaaatagaaacatacttataaatataactttctattatattacaaacatttaatgaagggaatacttaatactatggaatcacgaggaatcttcaataatcaattttggtccttggaccacagtacaggacacaatagaaaaaaaaataaaaataagacaaggatctgactggtaatcccatagcagcagagaactgcagaaccatgtccacaagtgacattttggactttccaggatattccttcaaaagacactaacagggttattcagtttttagtaagtttgggaaacatagttttgtgtccttccttaaagtctcaaagttacagaatataatcattacagtacatatttctcttatctaaaagaaaaaataaacattgtacccacataacatcacctccagaaggcatttccttgattcattttccttttacattgtattcacttgttaagtgtggacaatgttgatgaagctattcacactgccttaaaatcttacaagcattctgctccccttgtgccttcattcctgaattcagtatagagtgatgtgggacctgagtctgccttggatatttctgaggtgcctaccttactcctataggtccatcatcaatgactctgctagttaacctggcacctgttgagttatcactggacagcaatccctttaccatgctgataaaacttcagcctcatattttacccattccaaagttctttcttctttatctaaactatagaagattatctttaaaaccttctcaaggaacaatgtgttggaatcactttggaatcaaaaaagtatggttcatttacactgtacatttaagttcatatcaacttaaagaatagaatgtattgtttcattagaggtcaaaaaactccaatgacttagcactgttaaaaagaaagatgaagagaggttatttgaatgtacagtggagtcaaatatgagccaatcaaaactatttttccactttctaacatcaacaaagaagttttatgattaatagtgtgcatagcttccttttgaattgtctcattatactaaaacacataggctaagaatagaatagtcttaaagaataatgccaattgattacctttgcttgcactttccacatgttccagctcttcaggaaatttcaggatatcacggtgttgttcttcacagatttcagcaagaaaatgcaaaagggttgttttttgatctgctgactttgtatctctgatctggaatggaaaaatagcattttaaaatttaagtagacattttccttaagcaaatcaaacaaaagagtgaatatagatcataatgaagctcacttgacctttttttttttttattaagttggcagttgcttcttaatggcatctagtgaaacagtccaggatcttaaaatgaacttattattttataaaggagaaaaacactaatataaaaggcaaattaagccttaatatatattttcaaaaatgtctcaatcattatggcaaaatgaactattctttttatgagacaagaacactcatttaagtatttatagtaatagcctcagttaatgtgtgttgattctaagaacactgtggtctttgcattattataaaatatattcttgaaagatgcattcatttgtgagattaaatttatttctagctatcatcaatgcaaattaacagaaaacagcatgttttatattcttatacttgcaaggcccataagaaaaaaattacaaagttgtttctttcagacttataaccaaaatcagactactcagtcatgggaacacgaaattatttattatttatttgcttaacattgcatgactttttaaagatacaaggggaaaaagatgctatcaatagaatggcaaaaatctttaaaggatagacctcaaaaatttaggaggctctaatgtttccttttgtagctctctaaaactagacacagctgcaaatgaaatcagagatttacttaaaaacaatgcataaatacaagacaacatttcatatttttctccgtttattggatgttttaattctataatccttagatgatgtctttctccactggtgttcatactgatttggggtcttagctttaaggattactctgtttagaataaatatatcttcttcacaaacaggtttaggaaaggctgcagatgatacttaggtaattacaaaataaattaacccttattgttttagtgactaaaaacaaacaaacaaaaaggaatcatagcgtttattatatcaggcctatatcaaatctgttatgtgctaaaccttttattgactatttacatcctcatgatgttaacaaatacaaagaacattagcctcaagactttatgaacaaatggacacaggaggcataatgtagtagggtttgttgttatatttctttgagaaattctacaaatacagtattccatatatggaaaatatttaaaatgctgaactcaggctgattcaccagataccttttagtactacaaggttgaatcccacaatccaaggacaagctgtaagaacaaaaagcaacaggaacctcaagggcagtttatcttaagtaaggctagcagctatagcagaatcaatgggaagctctggtccccaaagagaactctttagctgggattactgttttatattttcacaaagtgcaacattttgcagtatgtgggacatttgaaaaaaaatcccttaaaacttaacatctaagatccccccaaataggtgccaaggtaaactgcaggaaaattcccccatccctaatagtaagaaaatgcattttttccaaagtctgtggagacaaagacgtataaacaaagaagagaaaaaggaacaacatacacttacacaatgttcaagataccaaattgcacaggtattttacagctgctaaaaatgtacatagccagtattgcaaataaaacagaaaatggtattgtcatatgctaattttatgcattacctttttctttgtccatggatttatattattttacagtaaaaacttcagcttctgcatgcattcttaaattgctgaatttgtacattttgtgtgtatatgagtgtgtacctgtctctgtgttgtttgcatgtgaatgcacgtgtttgaaggtgcacttgcttgtgcatgcatgtgctgaagaaataactcaatatatggtgtcttctattattccccatcttgctttatgagacagggtctctcactaaatatgaagcttgctattccagaatgagtggcaggccagcaagccctagcttgcctctgcctccaatcaatgagttagacatgatcaactctgccatttttatttttgctgcctaaggatcctgttccagatctcttatgtgatcaccaagcactttaatcactgaacaattttcaagtactgaaaagtgatttcatatttattcactctcagtgccactaacaatataattctgttttgcaatttaccatggtcaatggttgaatctacaaaaacaaatacaaacaaatgttattatttctaattaaatcaataggcctcctagacaaaatatgcttgtgaaattttagaaccataacattcccttaaaagcatgggcaaacagggtgaagcacctgccttgtcaatatgagaaatagctctagttggtatgggagacaagatgtttagtttatatagcaatatttatttttgagaaaccctcacacacacagtcttttttaaaagtctttggcaggaaatgatgaccaataggtggtctttttaaatctttctttctatgtataatccttagattaattctttaaaactaaataatattaaaatataatgcaaattattttccttaatgtagtgcattactttatattgtgtctgcagcatttcttcctttgtatcatttacacgctagctatagtctttctgtctcagtccatgtagtattgttcatttttagcacagaaggcaactataaacactttcatcaatactactagttaatgacatttatccaataatttgctgttgtaagtagacaagctggatatattcatctcttgggggtagaacaaaggtaatgtaatctgaatatgtacaaaatcacttccaaagtagttgggttagtttattaagagataaaattgatttctgtttgatatctggttacttaaaatcatgttaaaatttcatattcatgtcaaatatctaagtaaggaggtaggccggctccagcatgcataagtctcagaggcaagtatgctacaagcatttcaaagactggtgtagccagaagcaaagtgccttttggcacctttgtctatgttttggctttattcctacctcaaacttcactgaggtttgagtgaagttgagtgaagtgaccctgtctcataaagcaacttcacagacaccagacttatttttataagctgccaaaggattgggagaggctactccacaatcacctattttgcgtatttttcgaaacctaaaaataaaatagtggattcataaaatagaaatattttgaaaagctaaaaaaatttgtattatttcagtaacctgacttaatgaaaatcaatgaaaatatgagtgaatcactgcaataaccaagatctgttagctaataaaccacatacataatagttttaattgcagtcacctggccagtaattgttatacacaaaagattaataactgaaattaaatgaattcaatctccctaatatttaataacatccagactgtacatgaatacaaaatacccttggtagaacaacatctacatctatggccaattctgttctccccccaactctctcttagatttattgttttaatgggcactgctgttttccgtgtatatattttgtgtgagaatgtcaaaattcctggaactagagttacagacggttgtaggctgccatgtgggtgccgggaaatgaaccagggtcctttagaagagcagtcagtgttcttaactgctgaggatagtaaattttgcatgttcaaatacaatactaaagctttagataggtagagagaaaaatatatgagtaattaatgggcacctaatttaaaaaatcattcatttttatgtgtttatgtgtttgtgtgtatgccacatgtatacaggtatctttggaagccagaagagagtagaagatccccagaaactggagttaaagactactgagaactggctggtatgggtgctggaaacagaactcaggtgctttgtaagaacagcaagtgctcttaaacactgagccatctccccagggttccctaaaggacttattgattctatcgctaagtcattcaaacctagtaattgttggtcatggcatggttctgaaatctggctatttaaggacacagattcctgaattcaaccagggagccagaaacaacaacttaatgatccatatcaaccacattcaatccatctgtgaaggacctagtcgagaggtaattttcccttctgcttcaaaaaacccatgtttgtttgtttgtttgtttttgtcctcagtgggaacagaaaactggtagctgtccactgtagagcaacttgtcagaatgaaattttcttttttaaagtaaacaaagcaaatgtggttagtttaatcactccatagaaatgccattcttcagttctttaattcatggctaataggattgctttaaaatgtccaatgcaaagggtctatttcatctagaaaaccatcagacctccaacctctttcttttgcatacaaagctatttatgtgatggctcttgtttgtttgttttttttgaaaatgtcacttattgcttagtctagattacaattgcataaacatataccatgtgatcatagattagcacatcgtgtagttttatatatgttattccttgcttggaaacccgtatttgtctctccttgtatttatttgttaaatacctactcacactttaagactacttctctcctgcgagaatgttccaggtcgctgggcggtggatgcgcacaactttaatcccagcactcgggaggcagaggcacacggatctttgtgagttccaggccagcctggtctacaaaagctagttccaggccagcctccaaagccacagagaaaccctgtctcgaaaaccccccaaaaaggaactctcatttgtatatgctaaatgggaatataactaaacatatctctattctcatgtttattgcaaacgcaagcacttatatgcaagaacaccacactcacaaatgcaggcagactgactacaaaggctaggcttctccatgacactgtatgtgctgagaactaggtgagggtgaatgccagagtgaagttataagattctccactgtgcaacagacagtgtcctaaatattaacataagagacaaataatgatgtgcgttaactttgaagcctcaaggtttgaatttagtagaaaatatgtaagtacagagaaaagagaaaatatacagagtaactttgtggcaaatgtcaaggactgatataattataaggagttgtcagacataggagcaaaaaagataaatttgagtcactgtgaaaaaatgtgttttgtcaatgagtaacaggaagagaaaaatgggaataaaatcagaccccataagttttaagttgtgctaattaaaagaatggcttaacatgtcagaaaaccctaactttagagtgagctagttttagaatggagaaagcaatatggaaacactctctgagaaggtggctatgaacaactcattgtcttggctgtatttttcttaattattagatgaagagacaatcctattttattcattattattggatacacattcagacttgaacctttagcctgccatttcctggttcaactttcttgggtaaacacttaatataaactaggtataagataagtagttatgattccagacatgtttgtggaacttgatatgataaagtattatcagggtaattatcatcatcaaactataagaaatgtgagcctcccttagtttgcaatcgtagttataagtcacctaagtcccccctgacgtggctctcaactagcatgacaatttcctgtcttgccattaccctctctcaactctctccaacttcagctatgtatgtatctactgacacaagattattattgctttttaaatgtgcttcttaagacattttatattcaacagtgaaaacaatgctattcaatatatatttgttggttgaatgaaaagggaaagattcccatgcattcagttggtttctttgtacccatgaatattttccctttaccaggaagatatatctatgtttgtgtgaagggggaagaatcaatatgggctattcatgtgtcacgtgcctatggcagaggcactttggtaagtgccttgtatgcatatatttttcactcctcaaaacaacttagtgaactagttatcattatatccattttataggtaacaaagagcatacaggcagagttcaactgttaataagggatggtggcagaatacagccagttcacttatacatattgaaacttaatatgtactggatttaaaaatgggacgtatgttatgaagaatgtgtttggaagggggaaccattgcccaggaagatgcgtcattaataatgagtcttttccaacttcactgagtataattaataaataccacttttgttttttccacagtgatttatacaggctctggttgtaacatttattccacaatacataattctgttgacatactcagtatcacctaccagattgtgacctctatataaatgaggactatgatcagatttccccctggaatgttcaatgaataaatgcaccacacaagccaaagataattaaggctaatttgatgattagagaaatctttggtgaccttcaagtattgtttcagaatagtgccaaggacataaaattaaatgaaatggatagccagaaagaggaggtaatgtgtaaggataatttattcaaaatattgactgtggataataactggataatagagggggcagtagagccagcagctggaaaatggtgaggctagtggcaaaagttattataattatcatcctgaataagttcagcataattaggccagaggagaataagaactggaagaaataaaaatagaaaatcaagaattcatgggtgcctgcaactacccaggcccagatccagggttaagtgttggtccacccccaaatccatcttatctgtgatctgctggagcacagttggggggttgtcctcaagacccagagctacagggtctccactccccagggcacatgggaaagcaacaggatgtccaggaggagtcccagtgagggcccagtgcctataatgtatcagagaccaggggtctctaatcaagttaatgaatctttgtgatgaacacctgcatgtaaagccttatagataaaggggtttagtgtatgactcactgggtcacactgcagcttctgtaaggagattttccctttcttcctatttaaaaaaatggttttgttttcttttggagggaggaagttgcggggacagagtgcagatgtgggggaatgggagatgggtgggatctggatgcatgatgtgaatgacacaaagaaccaattaaaagggaagataaaaatatgatccactattttgaaatatagatttatataaacttctaaattcaaacaggtaatatttaccttattgtgtcagaatgactgttactataaactctttacaattgccttttaatcataacatttttgttaactagtcttgtattctctaatggcaattcatagctatttctctttgcttctaacgattttctacaaatatttatatgtttaaaagttttgtgtagatggaaagagatagtttataccgattctttgggagttatctcttagtttacttacttatgcaggttttttccttttttatttaaattagaaacaagcttatgccaatcccagttccctcaccataccctcctcccctgtcctccatcgaccccctagcccatcccctttcttctccccagggagggtgatgccttccatgggatatcttcaaagtctgtcataacatttggagcagggtctataccttcccatgtgtctaggctgagagagtatccctctatgtggagtgggctcgcaaactccattcgtgtactagggatacatactgatccaccaccagaggccccatagattgcccagacctccaaactgacattcacgttcaggggatctggatcagtcccatgctggcctcccagacagcatctggggtcgatgtgctcccccttgttcaggtcagctctttctgtgtgtctctccagcctggtcttgacccctttgctcagcactcctccctctctgcaactggattctaggagttcagctcagtatttagctgtgggtatctgctttttctttcatcagctactggaaaatgaacatggtatgtactcactcatatatggattttagacatagagaaaagaaggggaaagggacaagatctcctgaactaattgggagcatgggggattggagagggagttgggagaaagagaagtggagaagaggaagagagaggagaaaatgagggagcaggaaggttgagtcaggggaagaatagaggagagcaagaaaagagatgccataatagagggagtcattataggtttgaagagaaatttggcactagggaaatgtccagagatctacaaggttgaccccaactaagaatctaagcaatagtggagaggctgccttaaatgcccttctctgataatgacactgatgactaccttatatgtcatcctagagtcttcatccagtagcggatggaagcagaagtagactaattcggcttttgtttgacagaaccacgtgttctctctagagcagaaactgctcaattgaaattttgagagaaaggtatgacttcatctattaaccatctatcttataccatgttttataaattcattgtgatattaataccttaataaaagtgagcttctcaaattaaaaaaaagaattccaatgttctaggctagggatacaccttagtgggtgtcttgcatagccctggttcaagtctcaatacttttaaaagatgggaaactaattcatggttatcgactagaatattaaacagagaccccttgaccaagcacattgacctcatctggaaagttgtttgaaattaaaattaactaaataagaaactcaaggggtgtttcttgcttaatcaggggaaaaatgtgtgtgtgtggggggtgtcaaaaaaatctccaggtaattctgatgtatactaaggtgtaagtgcacactgacaaaatttccaggtcaagagatagtcaggcagttgtctacagtttacctacaaaatcttacaatatttcaaaaataacaagttgttctgttttatgtattttcaaagcttgatgtcaatttaaaactagagaactctagtaatctgtggctactaaagaacagaattgttctaactgttctcgattagttagtataaaatgaaactggtctgtatcataatttaccacttagtggtccaagagcacaaccatcaaaccgtgcatgctgtgctgtgtaggcctcatgaactgtcccttgtttattccttaaaactatactaaaattaaactcacactctactatagtgagtctggtatactgtgtttcagtggagtgatggactagctagcctagtagattattcacctcctcttaactaacttaagctggtaagcaaattgtcactcagaccttttttcagaaaacttgagcttcaatgttggccacaaaaatacctgtgatactaataccttcctcaggtctccaaggagctccatgcctcaacccttgggccatacagaatgtacttacaggaaatgtgaccacacagtgtctatgaagagaaaatgatgaagtaccctccatgaggcaggcatatgctgatactgtgttaccagagtcagcatgccaatgtcaggtataaagtaaattgtgaggaggtgttgtataggaaaaaacagtgggttttacacatctgccccaaagaaatcttacacatcaactttagagtgttacagagaaaacactcagctaagttcatgagaatggttcattctgggaagtagttagaattgtcttgtacaaatggctggagaatgtatagttatcatagacaaaaattgaactgcacatatagaataaaaggaatgtaatggcaaagtcacacatatgcttcctagtgagacatatttaaggaggtctaacatggaagtggtgttaagactgaaatttgagacaaaggtccatgccaatcaactacattagaagtcagctttccagacctctccctttctccttatatttatacaaatggctacaaggaactcgggctcattaagaagtcctgaattaacagttgctctctcctggtgagaagggaacagtcctactgcacacctatactggattgattaaccttaaaaagaaattagatactcactgaagacacagaatctggttgaattcttgaaatgaaaccatttaatctattactgtgatcagatacttcaactctatatctttccgtaaaatgttccctaattatggcttatttttccctattatatttatatattcatggaacagttaatatttaagcaatcatgaatgctccagtgcatatatcaaaacaaaactacttcgtgccagtcttgattcagcagatgaattctaatgttagtttcctttatttaaaaaaattaaattctgtgttctctgccaagagttgtttacaaattattgctttcttcaacaccagcacacatcgcaataacactgagaaagataatgtacttttaaggattgcaattaccatgaagacattagctctgcagctacggccagacaggtataatacatgcattcctgtcccggctttatttctgaatctgtcaccaaaactcattttttaaaggtgttacatgaccacagttgacactaattcagccaaatgtaatttacactggaaaatatgtcccaattcttggtataggcttgattgtcccttttttacactcttgatttctgtattataatggtacttccaacaaaaggggaacagatgatatcaattgtataaaaagtcatgcaatttaagagctttatacttgttaacttaatttatggtagcaatctgtgaaagcagaacttaaacttgaaaccatgacaacattaaatgtaataaggattcatctcttttgccaccttcaagcccagcaggatttttgtgctattagtttctcagagaagacaaattctgctttcctaccctcactgctctacctctcagggttttccttatagtatcacttagtcaagaagaatgcactacatatgcattagtctgaagtagccaggacctgtggcaaatcaacagttatttatgctcatttaggaaaggccacaatgcactaatgaatcatgtctgacataaaagcaggtctgctacttgcaagtgcttttacttaatcaacctgtctatagtaggcataccaaacaaattcttctgagaatagttttaagaaaatcaaattatttttaaattggtataaaaatagtctacaagcataagtatctcttgggttttgaacagattctccaaaaaggcttggtttatacaaataataaaaccacttaacttttattgtaataaacatttttacttaaacatgactatgtgaagtttcagagacagtgaaaccagttctttgttgtttttccgtggacataacttcaaagattatcaccagtaataaaaaagaacatgggcaataatgcaggtaaatgagactcagaggtgtgccattagtgcaagagtaactctagtagtcatcaataaattctttgaaaagtgaaatcaacagcaataagaaatagttatataagtatatttcagaatcttccttcaatcattcattcattcacctttaatactctatgtaattttaatatgaattagcattaatcattttctcctgttgaatatttttctcatcgcttttctgtttctgcatctctggaaatgattatcactgatatcttatcagtgatatcttattacagacaaaccagctatgaaacttctttttcattgtaagaaatgtatatgaaatttagcattttaaacacttggagttaagtgacactaaccaaattcacatgcctgtgaaaccattcctatatccataataagaatttcttatcatcctgagctaaaacattaaacactaacagtctgttccatttctaaccttgcaggtagctacatctctagcttttatctgtataaattttactatcctaagtacttcatatgaagacaagattaatcaatgatgcagaatgtacaagaagttcattgcttaatcttttggtagtgatacacaatcaaatatcaaaagaagaggacttgttgaaaagatggggggaattggggtgtcaataaaattcattgtataaacgtgtgaaactgtcaaacaacaacaaaatcttaacaaaaataaaaataagtaaagaaaattggtaattgcctggagctgtaaagtagatcaacagagtagggttgtgaggagtctattctagagactttggtgcgtatctgtagtactagaaaaatgccaattgcaccaaactttattataattgttcaagttttattatatgcctattatgtctcacaaaaatcccttaaataaattatagctgaggatcaattctcttttaaccactaacaaattaaatgctactaaaaacaaacaaacaagcagacacaaaattaaatttatgctttaggaaatcaataaacactctggcttttcttatatatgtcataaaaaatgaaatttgggagtgctacagaacttgaaatgggccaggctattgctgatgaaaatatctgacaaccaatcatttgtaccactctcccaaatttgagtacaatttattataatttttcatgttccttcacagcagatttctaaacattatactttaaaatgtttttatgttttggatggagcatatcctcccaaaaggctcatgtgctctagaattggtccacagatggcagcactttcacaattagagcatgaagatattgacttcataacgggctattaggatgtaggcatggcattaaatttcatatcatatttctgttaacatctaggttttctctgcttcctatcttccataaggtgagcttctttgctccactgtatgctccagccacaatattctaccttgcttccacaggaaaaaaaaaaaaaaaaaaaaaaattgtcattttaaaccatgaggccatggggcaaacagatgagataaaggtgtacatgataaagatttcattgaatttgaagagttaattcctttctctaaacagtcagcctccaaagagttgacatttcatcatacacagatcctttatcctgagcattaaatataaaaatgtttcactcatacttatctaaatataactcatgaaagtctcttagtatgggaggcagtgtttgatttttgtacctgattagtgtgtgtgggggggattgtgcacataaaaatagttttagttgtataatctattatttttgacttggcagtgctaaatgttatagaaatattttttaaaaaccaatatttaattaagaggggaggagaaagtagaggattgtgggaagtgaatatacaatgtaccttgacatatattattatgaagcttatcactgtataacagatgctaatgaaaatgtgcaaaaatgcagaaggtacacagtaacttgagaatcaattttaaatattgaagcattaaatcaaatgtgtaggggctggagagatagttcactggtgaacaacacctgctactcttgcaagagggtctgtattcaattccaagcttccacatggtggttcactgccatccataactccagttgtaggtgctccaaagccctcctctgacttccacagacagcaggcatgcatggagtgcacacatttacatgcaggccaaacatttatacacataaaaataaaaactaattaaaaaagaaatgtgtattatgagattccatattgtaaatgaagaaaccaaagaacagagaaagagaaaaaataaaaacaaacaaacaaacattaaggctttgtgctcaccctcatgccagaattcagagaaaatcaaattgaaaaggagtaatgtccatgttatacataggactggaattatccctatgctttgcacacaaatgcagcagctttacagtgtggatatcacaccacagagtgctttattgcctgggagttagttagctagcattcatgagtaacaatttactttttatgcgtgtccatccttcccccttacagccctccccacacacttttctccctctctctggctttaccattacagtgttctgtatgtaccagtaagctcattaaaaaaaaaatgattggaaatacgtttgatttttctttttccttgcaaagatcctagcagtgggtgctacagagagtaaaggttcaataaatgtggctggattaccagcatggaaaaaggtatttaaatagatataaataattcctaaagcctctaaaattatcatagacctttatgttagtataaactgccactttataaacttccttccagtcactggctcctcttattaaggttgtgtaatgcgttcattaggaaggcttcatttgactggaaaaccggtttgtaacatgagtggtcacattcagtcatagtagccatgttttattttggacaacagtttcaaacagggtttcaatcccctttgaacagagcttttgtagaataaaaaagcatttgttttcaaacttactaattatattcactaaatgcggctcatgttgtcgactttcccccactgtgagaattacaaaatcagtcataagattaaactcagaaaatgactacagcaaatcacagaatactaagccagctgggttcatttaactcctctatagaaacagtctttgtggtgaaccaagtaagacctacagctagtcccagaaagatacacttcttgtatcttctagtactgaaaatgtttacaaccacttttaattaatgtgaaaatcatcaagaagcacccttcaaattttcaaattacaaacttttattttaggtagctatacctctcaacccaacatttgtcgctattacagtttagtcacaattatttcacaaatatagttgtgaaacagtatgaattgagcattttgaaatagtgaatacttgtttgattaatatataggacctggagtgtatgtcttctacataggggggcagaaatttttcaataaagaagaacacatgttgagagaaaaaagaaagatgacttttaaatagttgttattgacagggaataccaatcaagactgcatttacaaagcactcttctctaaagaatttaataaactgaagatttgagaatttaatgaagttttcacacaacctaaactatagtgttgtaaatgtgctaatctaaaaagatgtaatcaaattctgagaaaacaaacaagtgttacatttaaagtattaacagcctcatttacacccatgaatataaatgaatatttcagttttgaaaatactcttaaataagctcactagtactatgcttcagactcttaaagattacacaaagggggaagaaaggaaaattaagctgtgagctgggttttactccctcaaagttcaaacattccttcttcataactacaacagtttgaagaagtacataaacaaagttaacacctgctatatttggtgtctctgaaaattaatctcacaacgagtcacagaatacatttctcacactgacctgttttaaaaaatgatttttaaaagatgttcagaggggaagaattttgcaagatgaatttttcaccttctgtttcgaactacatcaaataattgcatcacagtgttatttaacatataaattatattgctacataaatattttttaaattagtctattttgtttactggggattgaattcagaaccactctatcaagcaaacataattatgttatttttgtgttttctctctctctctctctctctctctctctctctctctctctctctctgttcctcccttcctctttcccctacacttcctctccctttcctctagccctctctcccttcaccattgctgtctgttttgtgaggcaaggtttcactctgtaggccaggttggaactcactatttagaacaggctagtttaaaactcctaggcaaccctcagcttttcaagtgatggaattaaaggtatgatatagcacactcagaatcaatttttcacttttgattttctggcaaagtatccctaaattgtccagattagcctgcagctcctcttgttgcttagggaatgctaaaacctgctatcttcctttgctcacattcaaaaatagctgggatccaggcctccactactaggtctcccccatttcaattactggcctatagagaatagtaacatcaataagtgattctaattctacaaaatgtgtggccatttagaaagagttgaggttaacattttagaattcacttatatagtcagagatacaaactccttacaccaagtatctttctactttaggcatcaatctgcataacagcattatatcaggtaaaggaaaacaggtattctactactctgaaatgggaaaagtgcattcattttcacagaaggccactttccaaagcccataatactttagtcaaaaaatcatggtaccacaatcacttatttccaccatatacagggttacaacccttaaactcagaagtgggatttattttcattttgattttgaatggtatgaatagcattagaggtgagggcttcatattggaattatgaactggtaaccaaatgccatgatcgctcaaaaaattacatgactaaaacaatctcatgacaactagccaatgtgcacaaatccacatgtacagtttaacaacccagctttaagatatatacttcataacataatgggaactaaacaactttagtaagagtgcttttactaacaaacaaatttaaccttatataactttctattaatttcaaagtttctagatttattgacttaagtgattttagggtctcctattttataatttcaaaatttgctgtgttgatttacatgaaaaactgtagggaatgacagttttaataactgagtctagaatatcaccaagagtatagtaaatgtagtacaacattcttttcatgctcaagaggatttagtggttctcatagatgagagtccagtagataaatacaataaagcacaattggtgtaactaaaggtcaaatatttcataagttgaacaaaggcaactatttaaaactgtcactgttttcctgcccttgtatcctgtagtacttagttatttcacatgtcttctttggttaatggtcttgcttcagtgtaatataatgtaatgcaggcaaactctcaaactgaaatgtttgtgtccagtggtcatgaattatgaatacattgtatggtgtgtcattatatactgacattttaaacatgacgtgccatgaatgaattcccttacatttgctgtagcaccgaatcgtatgtcactaattataaatcaaagacatgaaaacacattgctgcaaaaaatgccaaaggatggaaagttcaaaggactcatggggaaacaggatcttagaagggctatctaacatttcttcctattctatctaatatttttgtcacagtatttgttttataaagccaattataaacctgtatcatttatttctcagcaaactgtcaaacatctttccaactcaagtaatgataagcattgattttttttttttacaaattcacatctcagaaaggtaaaagtgtcagaaacaatcctaaaaattctgtggttgtctgaaatatatatttgaatattctatcattgaatgatcactcataagccatcaataaactactgagaataattttcacagtaagaatatactcataattgtgatgaacaaaatcattacaaaaggaagcataatatatatgttaaaaattaacgataaacctatatttaacccaactacgtggcattcactcacacctaattgagagttttctatacaacagacattgaggataaaatgtagaataagataccaatccaaatttaatgggctcagatttgatacagaaaaacaaaataagatgaagaccctagtggggagatcatgagaaaatggtcatcttcagttaaatgaagaagacctcaagagacaccaaccagtatcttggtctttgaattatggtcttagaaaattaaaaatacctttgaacctctgctattttctcatggtacctgaattgtctaataccctgtcccaagtattcacctctctgagcattcagattttatttttttattttgttttgtgttttaccataaacaaaagaagaatattagccttcattttatgcttaacttcaaatatttatgatacaattcacagcattttgaataaaaatgattacacattgtgaaaatttagaagaatttacacattactgaggtggactatgctttcccttgaactttttcctggattatttgcaaattttgctgtcatacaaaaaaagatatagtctttagggatcatatttaattgtaagtaatcttccatttcacaatgcaactaaacttattttacttccatttttacaactctatgatggtgaatgaaatgctttgatatttggagtgatgccaagtatagtttctttagcatcagaataattaatcattgacatgaccaactatgatatatttaacattataatttctcagtatactctaatgcaatcatttcactggacctaagaccagaattatacgaggattagtgtatttcctcacctacagatgaataaactgaagttcaaagagtcttagctgtaactacttggacaaggagtggttctgtaatacacactaagtcaaacagctactactgaaatgtgcagtcaaacacagagcaaagagccgaaaattacttgaagacaatacatccctaataaaatgtcctagacttttcactttgctcatactacaagaattttccaagctgatactgtgtcttttaatttatatgtatattattatgttattgcatatatatgtattactctattattacatatatattaacagacacagtggtagctttaaaaatacacacaataaggatatggtgttttgcctgtacatatgtctgcccatcataggcatgccagtgcctgcagaggccaaaagagggtgttagatcccctggaaatgcagtcgcaaagacttgtgagccacgatgtggatgcagggaatcaaaccaggggtctttggaagaacacccagttttcttaaccactgagctatccctaaagcctggctgttcctttaaagtcaatttctttagcttttctccattttctggttgaattatctcagatccttccaacaaattccatttttctcttgactcagaaagtcacttttggctgtaaactaataaagatccatgactaaaatactcacacagatgaatgcatagggaaagcttgattttttgaatattttgtttatgcatattatatatgctattacatactgaaaacaaaataagaaatgctcctcaagtacaacactggaattgattagaatttcaatgactaacacataagtatagtccaagcttgcaccataagttcacctacatttacatgggttttagtacactagcgcacattggtttggtgactcaaagtatgattcactactaaaattaaaaaagcattttccaatcattataaactttagtgttatttgtaattgtagctaactcacttgtttacctttacttcacaaaaatcaaggcagctgattttgactaaatattgtatattatgcaatgaggcatctcagataagtttaattacttacatcaatcgtccttttttcaagggatgaatattttaatgtgttttattggtttttgttgaaaccagtagatgttaattttaaaatcaaaaaaagagaaatttatcattagaaaaatttaggtgagaaatggtatccatttttgaagcaaaaccagtatttttcttgaagaattccctctgcaatttattaaaaaaatcaaaaaagtagacttttataagtgaaatttaacagaaattctagctaatcatgtatcagaacttagtaaattcctttttttgaaagattacagatctaagctaattaattctatgcacctcagtaaatttctgtcattttagatatttacatctacacagaatcctttgtattgtaggaaaatctttttattccttacattgtgggaatatcaaccatgtatatatcatttctctttattaatgacatgtatttcccccaatgtatttcccagaagataaaaatccaactgaaaagtgtgtgtgtgtagcggggatggggggataatattgtaaaacctttacttctttttcctttagaacacctattactacatgatagtatttcccccaagacggttttttattttatttgaagttggcaagaatcttttgctaaatcctctgagcatacctctagtgatagatgtcagatcagtgctatatggaaaaacttttatttgacaggtagatgacaggaagaaagctctctccaaaataggagacctaagaataaaatctttccatgagattaatataatcttttgctcttgtatataagtaaattgttcattcttgcttcaagataatcacttcatataataaatctgaataaggtgaaatgaaggcagttgagaagtgaagtattaaaattacaagttagcttaagatatatatgtaaattaaatgtaaattagatatataagtacataaatataaattcagctggcctgaacaaggggagagcacatcaaccccagatgctgtctgggaggccagtacccctgaacatggatttcaatgaggaggcttctgcactccagggggccccttgtgatggattagtatttttccctggtgtaagaagggactttgagagcccatctaaatgcccttaccctaaaatgagattgatgactactttttatgccatcctagagccctcatccagtggctgatggaagcagacccggacatccatagttatactctgaactgaactctggaacttcgttgaagagagggaggaatgaagatcgaaggggtcggtaccaagttagagaaacccagagaaacagctggcctgaacaagggggagctcatcgaccccagatgctgtttgggaggccagtacaggactgatccagacccctgaacatagatgtcaatgaggaggcctctgcactccaggggacccctggtagtggattagtattttccccnnnnnnnnnnnnnnnnnnnnnnnnnnnnnnnnnnnnnnnnnnnnnnnnnnnnnnnnnnnnnnnnnnnnnnnaaaggacccaggcccagcccaggatgatgtggtggactttgcggagaccctgttgaggaccctaccctgcctggggagtggagggtggatggggtggccaggtggactttgatgatgtggtggactatgcggatccccagttgaaggcccctaccctgcctggggagtggagggtggatggggtgggggttaagtcggggtgggagaggagggatgggggtgaggggagggagagggagaagggatcggcatgtgaaacaagcttgttcctaatttgaactaataataaaaaaatgccaagttaaaaaattacaagttagcttaagcaatatatgtaaattagatatataagtacataaatataaatttatactttatttaatatgcatctttataataaaatacccaaagtatagattcacaaactgcacataaaaaatacagtcaaactgatctaattagggtaggttatatgagctataattgaaagaacaagaccataatagttttaccctgtaaatacatatataattattctagtttattccaagtattaccttattcttcttggtgttaccaaatgaactaatgtgtttcccactaccagaagaagagagaataaaactattcttgatgaaaatctggtatttgcaagttatctagtctattttgttactgttattattcttataactaataaaaaatatcatgagtaaaaggatagtcaaaatcccattacatatgtcatgctatcacttgcacttatgtgtgttacaataaccacaatcaaatcatttttcatacatattcatatgtaagtttgtgtatttacaccttgtataggtcaatgtatgaataataaagaaggtcatattcatttgggattcttgttaaaaggaatgtctagaaggagctaaacttctgcattattttctgatctgagaggagaataaacagtggaagcatggggagatgtcaaagaaagactacttctctccagatgcattttcatctcaagcttccttaaaggccttcacctcagaatctgttcagttgtctgtctataacagacagatgttttattttaaaaagttgagttgatgtgtctggacatataaaatcattttgtggatttttggtttcttaatctccttttcctaggtctcaaaataatattcaattgcccagtcaaagcagtaataatattatttcatttttacagttttaggcagataccttaaccatcagtgagagcatattagctcaatgctacccagaaacaaagcgttttgttttcatacagcacaataatcgaatcatatccaaagaaaagtaatcgaatcatatccaaagaaaagttcctggctcttttactcatataattaacctcttcaaatatttctagagacataaaataagcaaaaagagagtaaaatatgaggtaaaatatattttacaaagacaaatttggtattgtctataatctccagaatgatttaatcagagggcatgattaaaaaagacttcatagtattttgaattttattgcaataaaattataaaatatttattttaatcaaggtatagtccggagttacgtgatcatattcaatcctatggcacatgatttggagttgataatttgtttccatttatatatcatttcagctcacatatcaaaaaactactgtttagaaatgatatcttaccttacaaaggaagttgatcttgaagcccaaagactgggcattccttgagcctgagttcatgtagtttcctaccaaaagaaccagctctaaaagtctattaaagctttcacttttcttcagttcttcacatgcaagagttactgacatgatgcttggtttgatgttgtttacatgttcttcaaaggtgagtttgaagaggatgcttgtgagacgaggccgtaacattttcactgagctcatctagaagataaggagtctctatgagaatgtctatttaaaacgttctttcatctctctgtgataatttcataagcaatattgtaagttcatgcacatagcctattctcactgagatttaaaatacactggttttgtttgttttcagctttccaagggagagatttaggtaaagttttataaaccagaagcagtcagatttgataaacaataaacatcatcatggttataacaacaaaatacagctgactgtgaacagtttttccatgttaattacaaacttttggccacatgtaacatacaaatagccaaaatttgttcctaaaatgcataaagttgggttgagtaaatagctagtcttagacagtgagtgtacacaatggtagaaaaacataggggtaatatttcctaagaaattatctgttggcatagtgttgaaaccagaggagtgatgaggactaatcgtttaataattgttcaacttacgacttctgttcatgacatacatgaacacttaaatatatcccaaagatttttcacctgcatgtcagatgttagtgttaatatatcattcaaaatttttatgttggttttcttcaaaacagttcaatttgggttttaattacttttttatgtcaaagtattgatgcacattcaaaattcctcttggtataactccaataataattattttgaggtttgaatttcctttagctcaaaattatttaattagtttccacttaccaaatgatatctgaaaaggtgatgggtggagactagacagacacacaggagcattttataaacacacaacgaaattagtgaacatgtttaattctacttaatttgcatgtgtattttagtctcttaaatacaaatgctgagcacagactaggcacagagatatctgaaagcagcatgaaatttcactgaagccatgaacaaaagaccttttgtttcaaacatgtcttcgctttgtatccaaggctggccttcaacttttgaagcaacagatttaaatcacaaagtaacttccactgtgtcccatgttcttaagttttgcatactgttctctagcttttgagactatttggaaaacttgtggaacctgtagaagtgtgactcagcgtggggaagtgagtcaatggtgctgagtttggaaaggtacaactgtcacacactgcttcctggtctactgtgttgtgaacagcgtttgccacatacacccactgccatgaacagatctgccctgccatgccttccctttccatgatggactaaagtctgaaaacataaaccaaactaaaacttgcctactttaaatcagttctgtcagatactttgtcatatgtatgagaaaggtaagtagtacaccttctaaagctatacatgaattattgggttaaccatttcagctctagtagtgaagcaacacatttgtctggctctcctttgagattaacttgcctattgaccatgggcatctgcttctctctatggaaattttagcttctaagaattctatgttttcataatttttccaggcagaaatataaacgaatggatataatattgccctgctacagtactcacatagcaacttgccactatggattattttgtttaaagtgcacacattattcgcatgtttcttcagcactctcatgacaagtacaaagcacactacctattttaagaagcttagatatatctagaaaatggcaacacaggcacatgaaaactatagctagcaatataaaataggtccacaattctagagaactttaccaatgggggacaatgttaaattcctgagactatgggggcatttccttttcaaaccatcacacgtacatagtgcagtgcaatggcagcagattgttcctaggatgtttttgagaattaaataattcaagcagaaaaatttgacagaaaatcctcaataaatggttgactgctgttattcctatactatacttaataaatatacttgttaactatactatttctgctaaagacagtattaaatgaataaaatcaaataaactcaatactctgagtttataggtcaagaaattaattatggagtcaagacagaataaaatatcaatacatatgtgtcattagtaataaaccaagactgaaagctcaggcatactttgcaaaggttttcatttcttgttgattctggacaaagggcactttgattaattgacatctcacccagaaggtagatggcatcatccatttgacaagggtgcaagaccaaatcaaacaagacaaagatcctagggaaagtctgcatttaacacatggtctcccattggtaaagctgtttagggaagtttatgaagtgtggctttgctgaaagaagtacaatgccggaggaagactgtgtttattgtctatcccaacttgttgttcactctctaggcttcattactgtggctgaatatgtgtgctctcagatttctactattgcccctcctgatcatcaaggagttttacccttatggaaccataagccaaataaactcattgttacaaaaatctgctttgaatcatgacattttatcacagcaacaagaaagtaactaatatatcattatgatacactgtccatatgcattattagaaaccagactggttgaatgatgagtggcatggaagccatcaataaggtaggtataaaaatgtcccaagaaacaagtaatgatgtatactattggcaataggaatagaaaggaaaagatttatgaaggagaaagaattaaggaagaatcaacagtacttggtaactaaccagctatggaagaagaaaatcaaacaactgtttcaaggctttaatttggttattccaatgatgttggaattaatgacagtttaaagagagcctgaagaaatggcttagcagttagaagaacttactgttcttgcccaaaacccaagttccctcagaacaagtggctcacaaccatgtataactctaatcccagggtacctgttgactctgtcctacacccatgtgcctacacatatatgcatgcatacgattaaaaacaaaaaaccttcagaagttgaagtctgtgttgatgcagtattgactcatgtttggttattttgtttcagggattgtggggaaatgaatgtgcttctgatctgtcatctatacaccagtaagcaaatcaaagactaagagggtagaggcaggtagaatactgtttagcaacaatgtcagtcaaacataatttcctatgtgaaaatagtcttcctacttttcagaccctcgatttccaaaattgaaaattcaggaaaatttctgtgactgttttctatgttgtaggaagatagaatcaatgatactaggtgtattcctgttactacagttttttaaattatcattgaagtggatttaattggccattttcttttgtgtcagtagtcttttttttttttttttagtaacaaagacactattagcttctgcttattaagattctcaagcttgaaataatattccaattactatcattggtcacacaatagtacctaacatcaaccattgcccacattttaacatgtcttttattgacaatgtttaccattcaaactcaagctttctatgtattacacttaattatgttacctatatacttttaaaatgccctaacagatttctctaaatcctctaaattttaccctctaaatggggtgcctttatgactagggaataatacagattatttgatatagagcttttgtcattacaatattatctggcaaaattttaaatagaattagatttgttatatgaatagattctttgggagacaaaatcactgaagaggcaagtgtgtggaaaagaatagagaaaagagtcaaattctgtaccttgataagcactcagtgccgggtcttgcatacattacatattttaatatttgctgactgatgttaacaatagtccttagataaatatccatttccagatttttcatggagagacagattgtatattgaacaaaattaagaatgggcaataatttattttcccctaactaattacattatttatgaggtcaaatttgaaatacaaaagaattacttttgttgaattgcttggttttagatgctaatctatcaatcaatatgactcaggaaggaactgtacagcagtcttagcagctctttgactcaccatgtacaccaacatttgatacatggcaggtgatgataaatgatagcttattaaaaataaatgaatacattcatttgcacgaactggaaccactagtacattaacaagatgcatataagaaagaagctagaggtggtgtacaggcaggcctaaaatcccagtagataggaagtagaaatagaagaattagaagtggaaggtcaccctcagctacaaagcaatttcttgtctagccttggttacatgagagtctatctgaaaaacacacataaatacaaacaaagaatatataacaggaaaggtgtgaagaaggctaaaggaccttacataatatcatttgataccaggtagttaaccctagaaatactacccagacccaatataatctttttgtttgtatttcaagacagggtttccctgagtaatcgtggctgacctgaaactcaggttagcttcaaattcacagagattcactgcctctatcttcctagtgctgggattaaggtgtgtgccacaactgcatggctcaatataatgtattttaagcataaggttcaagggaaatcttttagtaattcccagagaaagagagaatcaatatttatgtctatattttccatgcccctgctgttggttgccaaggaagaaacaagaacttttgagttttacagccatgaacccaaactccagtcgtgccaatttatagttatgtgaccaagtgcaaagctagctaatgtttctcaggttctatttcatcaacagaaaaatgtattcgtttcattatttatgcatgttcagtaggacatgaatgagatactgtgtggaacatgtctgttttatcaactaacaccatgtaagcactggaaaaaacagctgtacttagctttatttatccttagaaattcctagcaagaaggacacatggtcattaatgtgtctgccaaatatgaagtaaagtctttttggatccacaattaagcaatgtgtgtctgtggtaatcaatgaagaatgtgacttattatccactgggtagactccaagcatcaattactatgtctagaacacatcaacaggcgtgtttcagtcttaagtattaacttttacagtgagaccaatatgcattgatagacaaaagctgaacagccatcggagggttttctgtaatagcatggatagtcaagcttagaaataataggaagcactgagctacatcccaagatacatacacagctattaaaaggcttgtgtctcataaaggcatttgagtgctcctaagtgatgtaagtaagtaaagcagaaactttgctgaaacgtagctttggtatgttgttgtggtccctcgcagcattttagttgactggcatcttttgctttataattcattccttgaaatgctttgggatgctgaccagggtgttgtattataaagggatttatttgtattgcaagttacttgtctatcaaatcatatcaaaccattctcatttcttcaactgatctgcgctatattaaaaaaagtgcattgacagctttagtgagagcactacaagtaggttatttccccaaagagttaggcacagtttcattgatataatttgaattgtatacacttcataactataaagctggtgaatatagatataataccaaaatactacagaaatgcaaagaaaaaagataaacagcagttctaaatatcatgtatgactgaagaaaaggtcgtgaaacctttagggttattcaaatcaccttttactaatgcctatcatatgtgaagaaactgaaatgttagacccttgaaaatagaatttgttgcaattattaggtggatatcaagaaattaggaagcattattccctgaatttacaaaatatttatttgtattttactatagtaaagggaatgaatttggtcatattcaaggagggtttttgtcagcttggcagaactgccagtccaagagagattcagaggcaatgactgacaaaattttgtctggaattataagaatgaagcagatacatttgagagtttctactaaatgaatacttttcttatcttctaatactcaataagttcttcatgggcagggactctcctattcattgtttcactcgctgaactaaatccaatacctgaacaaaataatcaatatgagaattcctcttatatgtaggaaacgggaaatgtttgcacgttagctgtcatgagagttgagagccatggttaatctgtgaattgaagcactaaaaaacagtgttgaaaactgactctatatcagaaaaataatgatgtgctgatagagaatatttccccaaagatagtgatgtgtggaaattatgcattgagaaacatctactaatatttagtataaaacagaatgtaataacagtgtctgctcccccaaagacactgtaaactcagaggaatcacactgagaagctgaacaagaatttcaaaatattcttgtcaaaacatctagttgaggacacaaatgactattaaaactactgtggagctttgttattctactaagcaattaaagagataaaggaaaaaaataagagggtgaaatcttgatatttttaatttaatttaaattaatcaagtgcagaatttattgacagccatcaacctcctgtgaatattcaattttcaggttgttttattttaccttgttttaatataaaagatgactgaaataaacaactctgtcataagcatgaattaatatgagaagttactgaaatgaacagtaatataaatacagggacttgagaatgactcaaggtgaatgtttttttacttgatcaaaaattattaaactggctcttttttgtgacaaaatttctctgtgtaacaaccttggcagtcctggaactaggtctatagaccaagttgtcttcaaactcacagagatccccctgcctgtatctcccaagtgctaggattaacagcctgtgccactactgcctggctttcaaactggctttatctcagatagcattaaccacatcaacaagagctagaattcatatgtgcagaaaaatgaaaacagaaacactgaagcatcacaaagattgtttctaatttttaaaaaggaggaaaaaaatgaacatccaggactcttaactgccaaatgaataagcagaacaccctgattgcaagcaagataaaaaatgttaatttgctgggcgttggtggtgcacacctttaatcctagcactcaggaggcagaggcaggcagatccctctgggttcgaggccagcctggtctccagagcgagtgtcaggataggctccaaaactacacagagaaaccctgtctcgaaaaacaaacaaacaaaaaaagtgaatttttcttaatgaatatgcaagcataggaagtaatgcaatattaatgtcatctaggacctacaatatttttctaaattaattgcttttgatattacataggaaggggaaagcattttatcaatcccctttccacctggttaagctctctcgaacagggtttataagctctttagaggctttaaaacaattaaagcaaaaggaggttatagttgtatttctctatccttatgccttcacatatttttgcaaaagaaataagaaaaaaataattgttccatcagtaatatcatataatctgttctgttcattaaagatttacatgtatgaggctattgaaacatctttttttttactagattatagcttgacaatgtttttaattgaaaaatatgggtaatttttaagtcagaacaacaaaactactgattactaagagaactaattattgccttctttcctcagaagacatgctagtctaatagatatacacagtatgggtctccatccgcagtgcaagacaagtgggaatttccacagctctgaggtttgagaacagctgaactgcaaacacactctgaagcatctaaaagctccagctggggcttttggctgccagagctttcaaagatctgtgcttttcttccagtaaaggtacagcacataattacaatggatgtaccaaattcaattccgtaggaggtaggttggaagacaagtcagtgggaagttatgcagccaatctgcccctttaaagaagattattgatcatagaaggtgtagtaagtagcatgtctctcttgctgggaggtcggcctccacacagagggaagatctcaggcttgatattgtttgtttgtttctgcttaatcccctcctatgctttttttttttctcccagttgatagcaagtgattataagtagacccaaggttgtgacagttaaaaaaacagttaaaaaaaaaaggttaaaggaagtttaccaactcagagactgactcaggtaagctttattttctctccttaaaaaaaccctacccagaaacatgtcatttcttccgattggtggtaatattttagtcaatgtaggagtaatcatttgtctggtacatgttttgccctagctgatatgattgttatctagagagatgtgtgttaatgggaattctacagtgtagtggttcaaagatagtgaaataaaagcaactataaaatcctcattatgtaagaaagcaagacaagaaaataacacacacacacacacacacacacacacacacacagagagagagagagagagagagagagagagagagagagagagagtaaatctgtcaatgttagaaaatagtatatagattgagagtatgagaagaatggaaaaagtccattcgactttgtctctaggcaaagacattcaacaacaatttgacagatagatacatatcatgaataacatcagcacagttcacctacttatagaacttatactctaagagaacatattcaacaaataacctcacaaatcaataataaaactattacattctagaagggaatttttaaaggaggttctgagagttttacagatagacctacttttgacagcgacacaaatggcataattactgaatttaagctaagacttaaaaataggttttataaaggcaggtaaggaatgggaatcagagatgatagcacgtgcaatgattctgagaaaaacgaatgaattcaaacacataaaaatggaattcaatatggttgaggtacaatgaaaaagagctcaggtcacccaaaacattaaaactaagcaaggttgacacatgcgaggtcaaaatgtgcctgatcacccaggactgtggcgatggctagggatatgtttcaatgggcaaagtgtttgctgaataaacacaaggacttaaattcactccccatcacccatgcaaaggcacagatatctgtaaaggaagcactgaggagagcagggaaggcaaatcccagtgacagattggccatccagtctagctcaaatagtgagtccaagttcagagagacactgcccccaaaacaaaggcaaaaaatgacaggaaacagatatcctgatgttgaatccggtttcaatacatgcagacatacataagcaagaacatccactcacatacatgtgtatatactgtatatacacaatgaaggatggaaagagggaagaatggaaggaataaaaataaaaatactggggcattagtgttttgggacgtaccaaataagatgcactataaaagactcccaatagatgcactaagaggagactgattaggagagtagctaaagataaaagtatatggtaacgattacagggaatagtcctgctgcctcagacactggcagtggcagtacagatgaagttcagacctgaagtatatttcagctgtgagtaggaagtagttaatgacctttccttaatcaagttcaatgcatagtttaaggcagaatcctgattttactactggttgaacagttaataggaagcaaagcaacagagagtaagtggaaacttctgaagaagctgatgataggtaacagaaagagggcagtaactagcacgatccctgggtcagagaaacattttaattcaaacatctagccacccattttaggcagcaagtgacaagatttattttcttgaagagaaggccagagtagagtgacaaattgaagcagcgagggaaaaacacaagtatagtaagcaagaaacaatgctgtctggaattagatgggttagtaatacacaaagcagacatagggaaaatgtgcatgtcctagagcgtctatctacctatctcatcacactctcccccacctcccttcctttaggaaatcacagtacctaaaagcacagcctgtgaattctaactggttcccacatctactatttacattgaagccttggaacacttgcctgggttgggttggcctcagttcctcagcagtaggtcagagataataacattgtcaacctttaccttataaaacataaaagaacatgaatatgttgactggcttgaccttgtgcaggcattgcacaagtaaccacaggtgctgtgagttgatatgggccctgagaagttgcccacacctcacagggtaactccacagccatgtgaaaatatagacagcattaattgcactcaggggctattgataacaaaaaggaggacatgacgttgacaaggagatgagggttggcatgaagggggatttgatggaggcgacagtggacagaaatgattaaaatttggtgtgtaaatgtatgaattttctgaggaataaattaaaaatattcttgaaaatatggcccacataaaaatgttagcacaaagtacaagttagtaagcttttgctatcactagcactgcaatggaacattagtaatggaaactggccctctccttttctgaagtttcacaaagaaataaatttacaaaatggaggagtgtggggacagagctctattctgcagtacttgcctagcaaatgggaggtcccatgcttagtccccagagaaacaacaacaaatagcattaatccaagaccagagaccagcttgaaatcctaagttagaaacgagccagggtgatgtaacaacaaagcaactatggaggcagaagagacacaaagaggtcctgaaattcttttgttatgccacttgcaagaaagattttgtagtagatgaaaagaatagattacatagccgggcgttggtggcacacgcctttaatcccagcactcaggaggcagaggcaggcagatctctgtgagttcgagaccagcctggtctacaagagctagttccaggacagcctccaaagccacagggaaactctgtcttgaaaaaccaaaaaaaaaaaaaaaaaaannnnnnnnnnnnnnnnnnnnnnnnnnnnnnnnnnnnnnnnnnnnnnnnnnnnnnnnnnnnnnnnnnnnnnnnnnnnnnnnaaaaaacaaaaaaaaaaaaaaaaaaaagaatggattacagacagaagaggaaatgaaagacagaacggggaagcgagaggttgaaacatatattctaaagtcagggaaacaacgaagggttgtgatactgaaatcataaagataatttttaatatgaatattaaatactaagaatgggtgaagaaagctgaggacaggggttttcctaacttgggggttcttttattagttagaagaattctactttccaaagatatggccccattaggcagctaatataagttcaagggttaaatagtaatgatagtatattctcacagaactattttaagttgctattttagtcatactttatgtttctttccttttaaactctgcctcacatttttatctaaaagagtgcttataattccacaaacatttactacctattttacacaacagactgcatacaactttaaaagactaaggttattgtttattattactaattaattattaaggatattattatataatgaataatatatttgttaagaagagcgtgcctaacctttatttagtaagtctcaattgatagacttaggcaatttacgtagtttaaactgcttagcaatgtagtagattctctctgacaccaccccagcagagacagagcaaaagaaagtgagagtacataaggggcgtaggagaattcatgtatataaagcctgaaatatttatggttatgtgcataaacaagaaatctcttccattttctatttttgcctttagttcggaaggtatattgctttttatgccccccgatttcatttcctctgtaagttaccaaggatattccttgtgaaggacttgctaggcatactaatacatcttccaagataaactgcactcaggaaaaaaaaatggtttctgagaaactgtgtagtatacctactgtaaaactcataaccatcatgatgcagctgaaatctcagatggtgtatagccctgcttcaattataagatggatctgagctacttaggtttcaagtgtggacttgaggctacaaattttattatttagcactctgctaaagtgccaccatttaataaataatacagagccaattcagttgactaatagatctgatttaaaaataagagaaatatgtcccccatgtccattatatgctctatttgatgcccaatgtgcttgtctagtttccttttcaaggaattgacaaatctttctacctcaaattaggcaacagcataataaaacaataaaacagttttaaatatggacaagagattattgtatatgctaaaaagaacacactcactccaatctaatagagtttcatatggacaagattttaaaactgaagtaggaaatcagatcaaatctaagttgtaactactttgaaacattatggaatattttggatgaagctgatactacttgaaagcaggtccaatgatgatttaaaatcctttgtttacaaacgaaaaacaattaggaagccagagtaaaccagaaatacacataggaaataaatctgtcctgaacaccttagtttaaaaaaataccttctaggttgggcgttggtggtgcacgcctttaatcccagcactcgggaggcagaggtaggcggatctctgtgagttcgaggccagcctgatctccagagcaagagccaggataggctccaaagctacacagagaaacactgccttgaaaccccccccaaaatagcttttaggggttggggatttaactgagtggtagaatgcttgcctggcaagaacaaggctgtgggttcagtccccagctctggaaaaaaataggttttattcaaagaaactaatttcaatgtcctttatatttctttatggtcaatcatttgaatagcaggcttgtggtagattaatatatgatgatatattctttatactaaggcattctgtgccatttcaaatgatggggataagaaaaaatgattaaattacataaggtacctttttaagttacttgacttaatgggaaccacacattgcaagttttcaattgatcattgacagtctagaaaatttgaaaatatttatgatatttttgatacaatatttattttgaaaatagttgctagttttcttttttaaatttccttaaatattattaattttatttcagccttaattttcagggggctaaattctaacattctgatctaaagggaagaaaaacagccaatgcaatacagcatgctattttgcatgtattaatatcattaaatatcagcattgttgaagagaatatcccataatgctttggtatttttttgtgaacttaaaaagtaacttagttacttttcaataccacaatgctgaaggtaaaggctttttctaagtcaatattatatttaatcatgtagttataaagtaaaagaaatcaactaatgtctttcttatgtttgtgagaagtgtatacttaggcctttgtgatcaatacataccacaacaccaaactgttctggctcacagagatcatcatattcattcttaagctgtgctagttctttgagtatattctgctcagggagatgtttgacaagattctaaaaagaaaagcataagtattagtagttagtatctgattggtgagatgtttaagcatacattagcaactcaactaagcagattaaaaaacaaccaacctattaaattaagaaaaactgtatataaactagctgcaaagggaagttgtgccactatatgaaagactcataccttctgttatagctatatatcacaacagacagatgaccctgtcctgctgattggttaatttcaaccaagaataatctctgagatacaatcagacatactattcaatctggacagctgctgacccagtcaaattgctacataatcctcaaagttagggagttggtgtagaaatgctatagttaatttcttaagaatcatcaaatggttacactgatggctaagctatttcattccaaccatgactattaacagtacacatgattttcagttttccatatctttaccagctatgatggatagtttcatgtcaacttggaacaggctaaagtcaattaagaaaatgcctccaaattatctggccgtaggcaatcctataaggtactttcttaaggagggcttcatggaggagtccctgttcattgtgggtggtgccgtccctggattggtggaccatcaagaaagcagtttgagcaagccatagggatcaagtcagtaagcagcacgcttccatggactctgcatcagttcctgcccggttagaattcctcttctgactttctttgatgatgaacattgtgttatgaaagtttaagccaaataaaccttttccttaccaatctgtttttgacaatagtgtttcatgacgcccgagacagtagcatatgttatttaaaaaaaaaaaaacattatggtatatgtgaagcagtgatttttgtatactattctgaagccattttaaactgggaaaaaattgacattaacacagaaaacagggaaactaagtatacaacatcacatagaagtgggattttatttcctccacttatattttcttttcttccattcaatcctgcctctctactaaactcttgacatacactagtgtccatcatattaaagctcaaattttaaaataagagtgacctatgatttaaaataacatggatataaccatatatgcagatgaaatctaatggagctgttttcattcatgactataaacatttttatacaaagaaaagtaatcactaaacttattatttccattaaaaatatatttttgtagtatgaagaaaatgatggtttgtacatgccaggcaagaactctacctctatacacacacacacacacacacacacacacacacacacacacatataacacacacacacacccttttcaaaatttgagaatatcttaattgtatgtatgtatgtatgtatgtatgtatgtatgtatgtatgtatgtatgtaattttggttttttttacacagatacatgtaccatactacaaggaagtcagaagttaaatcctgatgaactggaatcagaggcaaatgtgacctgcatgtttcaggttctgagaaatgaactctagtgctgtgcaagtgcagtacacagccttaaacactctgaagaggcatagctccagccccatatgtaagctctcactagaaaaccctgaagatgtaaatattagaattagtgctgggcagtggtggcacaagcctttaatccctgcacttgggaggcagagacaggcagatctctgggagttcgaggccagcctggtctacaggagctagttccagtacagcttccaaagccacagaaaaaccctgtctcgaaaaaccacacacacaaaaatagaattagtaattcttaaaatgtgtctattactgtttttgttttgttttatgttgtttgttttctccatgacaggctttcactatgtagctctggctctcctgaaactcactctgcagaccaggctggccttgaatcacagagacccacctcctctgcctccagtgtactggaattaaaggcacgtgccactacctccaggctactggtttttgttttatcttaagtatactgttaagaaaatcaaagatacacttgggtaacatacttttcactaagtgcaactaaattaaatagattaaaagcattatttaaattatgaaataatttaattcaacattttaaaactctccatttcaatgtccattttctgtgttttattctaacccttatctatatgtcataaccccaagaaaaggaggatagaaaaagccatgctccatgattttccataaaacatggaatcttggctcttagaaggcttctatatatcaagaggtgaactcttcttctatctacgtttttactcccagagtaactttacacaggaaatggggaaaatcactctcagctgctacatgagaatggcaaaattcatttggagaatatataagttgcttgcggaggtgcctagaaatgatcaatattgaaaagtcttctatggcagtggccaagagcaattatcaattacatagaggcatacgcaaacagataagaatgttactgcaaacttcatattatctaaggactcttcacttgaaaaaaacaaaagagctcgtgaatttaatgtttcattcacactgcaactacttctggcttgtaaataaattgaaaagttagattaacagttcacataaccactacatgtgctatatgggggaagtctaatcatagtactaagaattggacacagacaaataacaaaaaaaaaacacttgaaaggcaatagattctgacaaattattggctgatagacaaaggtcctataagttttaaggtatgatccattctatttctttctcccctactgctgcttaatagcatgccttttctccttcaactatttcaaactttgtgtttgaaagatcaattctgggtgagtatgaaaatttcattctagaaaatgtcagtgagctgaagtttactaagaaaacaacaaaggagaaagaagtaagcatgccaccaaatgaggagattttccccctcatcttttatgtatcaccagttcagtttctgataactgtcactgttatttgaagaaatttctcctagaagaccacaggcttctaacaactttttacatttatgcaattactctataatgcttccaaaactttatttcttttaaatgttaattgcacatgtaaaggttacttaagtaaaggtattgaaccatactgtcctttccttcttgacaaaacataacctttctttttttgtcttatatctcattaagtcattttagtagtagagaactgagttaagttcactctgattaactctatcatttaccacataaatggaccagggccaatatttcttttaaaaaatgaattattgttgtattttctagccatctacagatggataaatgaaaagatacagaaattgatttaaattctattgataagtatacatgcacagattaatgaagacaaggagattttttcaaacacttggtaaaatttctgtcattttaccacacaactttctccacttgcttgaacaaaaaattcaattccttaaatattatatgttattatggcatgtttttcaacactttcttatggcatacagctaaaagagttttgtaggcatgtgttcatatgtgctgggtagttgtacaacaacttgaaacaagctaaagtcatctgaaatgaataaacctcaattaagaaaatgcctccataagaccaggttgtaagtaggacattaaggcattttcttaattcatgattgatggggaaggcccagcccattgtgggtggtacaatcccagggctcttagtgctgggttccataagaaaccaggctgaggatcaagacatgaggatcaaggcagtaagcagcattcctccatggcctctgcattattcctgtctccagattccagccccacttgaattcttgatctgacttccttggatgatgaccagtgatacagaagtttaagccaaataaacccttttctccccaatttgatttttggtcatggtgtttcacgaagcaatagaaaccctaactaagcgtactcgaggcttttatattatattcctgtgctcttgatctttgttcttaagggtagatacaaacacaactgttttcctttaaatagtaccaaagcctggtactgtcattattatttgtttaaatatgtgtttgccttttaataccgcatgccttctatataaatgtcacattacccattaggtactgtgctattggaggattacaagtttcaaagggacatgtatgctcctgtgaaaccatgacaagcttaaagcaacagcagtattatcttccaattgacgtaaaatataactcttctcagaaagtgatggggcaaatatttccttttgaatagaaatacccaatatctgtgcaactcttatagttacaggacaaatataaattgaacaaatataaagaacttatggttgtttgaaagaaaatggctcccaagggaatggcactataagaagttttggctttgttgaagtaggtgtggtcttgtcgaaggaagtatgtcactgtgggggcaggtctgtttctcaagcttccctgagtgtgacaggagttgacttgctattgtttgcaagatgaaaaacactctgctattgctgcagtatcaagtctgcctgcatgctgccatgctccccttcatgatcataaaggacttaatctctgaaaatgtaagtgatcattctttcaccaagactggttacatacacagcttctaagttttcaaaacaacaactgtcatttcaaccatatttgaagttagcatgattgaagtccttgggtcaattcccagaaacaaatgacagtaaacaaataagcaaaaacatcaaaacaagcctagacactgagatactactagtttatagccatgttaattctcatatgataaaaataagatatattaggacacataggatatattagcatatattagttttcaggaaacactgcaccactactcagtaattccaatgatacaaataatctattctgaaaccctagatatagtcctcataaactacagtgtgtgaaaataaaatcataggcaaaagtaaacatagacaaaaaggccctacccacaaggtttgagtcagtaagtttgagttatggtggaaattatatacttgaacatgtgtgagataaagcacttgaaaccatcatatatagagaaggtttgcaaggtttagacaaacagcatgtacacaaatattgaagacaacagtattataccaccagtgtttatgataatagcaagtaaaagtaacaataataaaataatatatgtgttgtacttactttttacagagcatttgaaaagggataaaacctaaccatatactacagttgcacattcatatgctacaaattcataaataataaagtggagccaggcgatggtagaacacaccttcaatcccagttcttgggaggcagaggcaggtggatctctctgaggtccagaccagtagggtctacaagagttatttccaggacagactccaaagctatacagagaaatcctgtctaaaaaaaaataacaggaaaaaaaagaatagactgggaatgatgagcatcagtttgagggtcatggtttcttctggagaagaaggataatcaatgtgcttcataagcactggtcctgtgggcattgttactttaatgagccagtcaatgacatgtttctactgaccaccactgtgtagacactatccttcacatctgcaaaggatatactcacttttcagtttgcttttcctctgaacaacaatcatgaaggcataaagaaaactacttcaagtcgaatcttgtcagggttgttgtttcagaaaataactgtcaacatgtttatagtcttataaaatatttcacacatattcacaaggggaaatcaatgacttaaaaaaataagagacaatcacatgattttgagcaggtcatattaccggtcacttagttacatgatgaataaaagagaggtagtcaaacataaattgaaatagtgctgcaaaaaagtccaattttgtattgtttgaaatatttccacctcaaagcaatattcaaattatctatgaaaataatgcataaaaagtgtatttggctaggagcactgattttctaacagatacaaaaacaataacagtcttttctgcaatcttcaaaataggattgtcttttcaactagcaatatgtgctcatatttataaatatttatatggctaactcttccaacactctaccgataaatgcaaaacaataatgatagatggcatgtacagatgatttgaaatatatgccaatgccaagtcccacataaaaagactgttacatatacaacagagtatacaaatatgcttgttaactcatgactggttttctatcggttaagtagcttcttagtcattcccatgaaagcctgtcctctttagcaaagctgacacaacactacttgtgaaaaagccttgtcagaaaatcataaaatgagttaagagacatccatgtttgggatctaagaagaggactggcaaagttttcccaaagcttatttgaaaaatcaacaacaaaagaaacaactcatgtcttctctgttcctgtccaaaaatgataagaacttcctcttgcatgtatactgtttagtattatactatacactacaaatgttcttcttaagtttagcatatcaaataacaacagtttcccaatcagtaatttctcatcagcaacagataatcacttcatctagggtagttatgcttttatttaaaaattatcatgcataccaaacctaagggccgttcccatagaaatgacttttacaaacacatgtgtatgtcattaggccacaactaagcactccaaaataggatcctaaagtactgaacaactgtacacataaggacaaatgtcccctatgatgcatgtgaacattcagagaaaccaaaacctgtaatgcttaatactgatttgttaaccagtcgagatctattatcactgaagtgacaaaggactgtgcatgcctgtaagagatgctttgttcccggttaagtttgtgagctgaaccattctctgaaaaggcttcccagacaaaaagagaaagctagatgagcagaagcacccatccctctttgattattgattctgaacacaatgtggccagatgcctcggatttttattgtaatgcattccaaatcatgatggacttttcctcaaaatactagtcaaaataaacccttctttccataagttgctttggtctggtgtatatgtgtgtgatgtaaatgtgggtggcctatatgtatgtggtgcatatgtatgtggtgtatttttgtgtggtgtatgtgataatgaaacaactaacaaatacactgtctatgaatgaaataataaggaactgagcaaatactcttccataacacatatgagccactatatatatatatatatatacatatatatatatgtatatatatatatagtctctccattattgcttagattgttagttggggggtcatccttgtagatctctggaaatttccctagtgccagatttgtccatctataatggcttcctctattatggtatctcttttcttgctctcctctattctaccccgactcaatcttcctgctccctcaagtccacctctccccttctctttttcctaagttcctctcccctcccccttctgtgtatatgatttgtcttattggttgataattaagactgagctagcagataaaaaatcctagtcattgaccagcagcattgtatctaatattaatctctctgttattttgggtgccgacatggcggcagggcttgggtggctgggtggaaacattcatgttacattcccccaggttcccaattaactcaggagatcgtgtccctttccccttctgggggggtgggaagaaccaatgtatgtctcttttagggtcctccttgtttcctagcttctctggcagtgtggattgtaggttggtaatcctttgctctacgttatgacccagacccctgaatgtgggtgtcagatacgaggcctgggcaatctatggggcctctggtagtggatcagtatttatccctagtataccaatggactttgggagcccattccacatagagggatactctcaaaaccaaggccctgctccagatgatatgaaagactatgaagatcccccatgtagggcctcatcttccctggggagcagaaagaggatgggataggggatcagtgaggggtccggggagaagtgcagggaaagggaactaggattgacatgtaaaacaatcctgttggtaatttaaataaataaataaatgatcaggctgttgcctcagagctcagggaaccctgcggaagaggaggcagagtgtgagagccagagagaattggaggacaataaggaaacaaggccttctacaccaacatgagcaaagctcctatgaactcacagagactgagcagcatgaacagggccgtataggtctgcattagcacctctgcacttataccttctagattactgttttttatgggattcctgagggtgtgaatgggtgggcctctgattcttgtaatttttcttggcctcttttccttctactggtttgtcctgtccaacttcaaggtaatagttttattttatcttattatatttcattttttaatattttaaaaaaggaataacgaaatgaaagaatgacaatttagtcgctagagaaaaggttaacaactgaaatgtcattatccctgctaggagagtggatatcattggagttatactgtgcatctaaaaccactacacgacaggccacatgctcaggggtagttggccagcgcacaatagactaccagttttttccttgcttttatttggctattgtttgggggaggattttactgttttttgtttttgcttcttaggtggtgtttttgttttgttttgttttctttcatttgggggcttttgctgttgtattaggtttttgcttgtttttgagaaagaacttaaagttggcttgatgaggagagaggatctggtaggacttgggggggagaaagaacatttccaaatatatttgaatttaaaaattgtttaaaaactcaggcagtaggaaagccagtaattcatttaattagtaattaatatgaaggcccagcccattatgggtggagttacctgggctagtggtcctggattctatatgaaagcaagctgagcaagccatggggagtaagcagcaccactccatggcctttgcatcagctcctctaggtttctgccttgtcttcagtgataaacagtgatgttggactctaagcaaaacaaaccctttcctctccaaattccttttcatcaaggtatttcatcagagcaacagaaactctaagacagcactcaaggaagaaaaatgaatatcattttgcttttcctttgaaacaagttattttcaaatctattctgctacatgcattgtaggaaacttataaaatggaaaccaaaatatttactctcatctttctcatgaaacaaaatgattatatttccttagatgaatctgtccacattgaatgcatcacatagggtaaaataaataatgtccatgttaataatggaacagtactttcaatttagtaaaaagccacttactaatgtagagacagatagaattcactgttcctttcattgcatctagaaataatagtcatttattccatgttaattagctatatatttattatagagcacaaacaatggtaagtattaatgaattcacatataatgtgttgaaaatattttttaaaatataatgaaaagtcaactctgatttccaatgagagatattgtactgtggtgatattttgtttgtgctctaacaaataaaatttgcctgtacattagagtgcagagctagccactacttagccactgaggtcaagcagtggtggcccacacttttaatcccagtactcaggaggcagaggcaggcagatctctgtgagttcaaggtcaccctaggctacacaaaatttatccagtgtaagaaagaaacagacccaagtggtggtggctcacacctttaatcccaggacataggagtcacaagactttaattccagcactaggaagttatataggaatgatatggctgggtggagagaggaatataaagtaggagacaggagctcattgcattcagtctgcaaattcgtaggaacgcaatcacccctttggtctgaggattcagagggcaaggatcacagtctgacagctggggaagcagcataggactgaaccagggcccctgaatgtgggtgtcagttgggaggccagggcagtctatggggcttctggcagtggaaccagtatttatccctagtgaataaatgggctttgggagcccattccctatggatggatactctgtcatcctagatacactggggagggcgtaagtcttgccccaaatgatgtgacagactttgatgaccaccatgggaggcctcactatccctgggaagtggatggggggttggtgcagagcaagggtggataggagggagagggaactgagattgttatgtaaaataagattgcttgtaatttaaataaaataaaagaaaaagaaatagttgctggctgctctgcttctctgatcttttagcattaacccctgaatctgactctgggtttttattattaagacctattagaactcttgttacattgtacaacctgtttagatgggaaacctttattagatacaccttatacctttccaaatgtaaaatcaagtcagtaactcacctatataacacagtagggggaaagataggtaaacaatggtgtttaaaaaggtcaatgagcgctgggcggtggtggcacacgcctttaatcccagcactcgggaggcagaggcaggcagatctctgtgagttcgagaccagcctggtctacaagagctagttctaggatagcctctaaagccagagaaactctctctcggaaaaccaaaaaaaaaaggtcaatgagacaagtatcatatgaactaattttctgatcccagaataattgtataatattatctaacttacctgccatattttaaagctaaatcacataaattgaatatgttaacattattaagctctggatatagagcagaaaaagccacttcatcataacatcattacatgcattcagaaatgagtattttgctgcctctaatataaacaatacctgaccagggctatttgcaactgagtgacaacccattttaccagaaatagaagtaggtttcttaaagttacagttttgattttgatcaatactaaacaaatgtatacagccaaagccaccaggtttgtaataaactaagaaaaaaacccaaataattagaaacttgaaattctgaaactttacaacttttctatcaagtgcaaaaggaaatcttaacataatggtttgcatctgggaacaatttttgattccctatattcattggaaaaaaactaaagtcataaggggcagtgagtaccagtactttcatctagaagatagaatccccccaatccactgttcaaaatatcacagtccaaagtaagggatatgccttatgtgtgttcactatcaagaaacttttaatgcattaattttgttatggagatataaaaatttttatataaaaggagtcaatatgtaaaccacagttaactctcacttggatttttcttcttgactgctcgtctaatattttaaaaagttaacatacggttgtgttaactatatattatgctgagctaacatagtaaagcatgatgtactatgtttatactattttggaataaagtataatttaagaatcaaatgtatttaatggatgtgatggctaggtactttgcattgtactttgcattgaagatacagaattacagaaacttggaaaacgcctatgctatatgaagacagtcctgaggtatagaaaatttctgactgtcatccttagaacataacaaaaggtggttttagaaatgtgatcaattacaaagggttatgatttgtttaatgccatcatctttatatttcaactcattttacatactttaaaatgagttggaagctagtggtgaaaatgcaattgttttctgtaacttgatttttcagatcaagaacatttgtaactgctatctgctccactcatttcttaagttaaaggactattgttttttggctagaagtagtcccatagtctcaggttaatatagagctagtagaataattttgcttttcatttcttagtagtagagttctagaagtttatgtgtaaagaggcagatacttccaaagctataagtacaactgaaaggaaacttctggtctattctgatcatcccctctgtccaatagtatccaaagaccaacagtatgaaatgattgaaaagtctgtgaagttttactgtagctacaagtgtgcaagacaggaaaatcaatgatctatgaggcaatgtattgcacaactactaacaaaatcctgttttctaattgatataataaaacattcattacttagctaccttttctttccttgcaaataagaacacaatcagtgactgtaacaaatgaaacactggttattcttttaaaatatcaacattgtacaaaatggcaatgagcagatgcaatatttgtatggataagattcagcttcacaatagactgaaattagtgcacaatgatcaaaaacaaaactgctgtcaaaacagacatgagaatacacttttaaaatttcatctgataagaggttagaagcaaaagatgaaaaacaatagcagctcatggatgaaaatatttgtggactgtagtaacattgcaaaatacttctctaagatgagaaataagaaagaaatgtcaagattgttcttgtcattgttaatgtttcaatttccctgaaaaattatgaaaataaacttggagaatataagttgtttattaaggagaaaaaaatgttctaaaattctacaatgctaatgctttcatagccttagttgatatacctgtagccttctaaagccatcaagtcttgtaaagtgcacaaacatgcagactcacaagcttgcatacaatacagatggtcgatagccacataaatagatcaatgattacaaagatggattgaagagacaaaaacgagctcgactattacacatgcatgaacttcctgactataagaataattatacactagaactggttaattgagggaagttgaagaatcttttttcttgcagaatcaatagctacccatttatctttgatgacttaggtgtagcactgcctgaaatccagggtatggattgaaggacctttgcttctatctaatcattttgtcagtattcaagaatcagttatatagatcatgtaatctgttttgggttgtaaaaatcacatttgagaaaacataatcatgtgggaagctgtaggttttgtgccttgtgtgcactgcgctatgagatattcaactgtgtttctgaaccataaggcagtcagaaatacattgaagtagggggcaagtagaaacattcttgtgcatgaatttgcagttatgaaggagttgtgtagagctgcatttcatctaaggtattattggtatctacattagccttctaccacacacagcatgaacaaaggaaaagacagaaaaaggtacacgatgagacaactgcaaatgaaaccacaggaatttccctcctctgcaagaatgcacttgtttcataaacgatgggaagcagagggcagaacaccgtaaataaaacaaacatctgtttagaaagttcaggggtctggtttaaagtttagcacattttaagggagacctacaaaataaggactgccagatgtagctgcaagtggtaatacaaaaggaagctctatgcagtaggacgactacaggccacactaatgaactgttaaacgtgacaaggagaaattttgaaggttttaactataatcacatgaaaaacagttaaagagatacgtttagtcagacttaatatcatagatagatagatagatagatagatagatagatagatagatagattagatagatatagatacatggcaaaacttacactgtactgtattgatatgaactattttatgtttctatgcaccagttaaaaataaatgcaaaaggtatttctgtccctgatctgtcacttcatcactccttacagctctatggtacctacagtataatctatcctggtttgatgcgcatatctcttttattctgctttcactatccccacccattgattcaccatatgtggtctacagaaatgaattccttcatcttttgtcaccacctttctttcactagaaaactcaagaatttcaatagttctcatatttaaagaatcagtgctttccaaatggtccattgatcttgttttctatactgacgtcaattctatccctgagacttactttactgtaatactgcctgtagttcttttctactatgtactatgtcctggattgttcttctacctgggttatcatgtttttttttttttttatccccaagtagtacaaacatcttataaccaaaaattttcaatgaaaatatattttaaaagcatgttatatacacaactgatgcctgtatagttcagggctctattattttatacttttaaaaaagtactctgtatttgcctgtttagtctattgatagaaaaccacttgatatatgctacagctgcattaattttcctaaacataaaattaaatgttcaatagtttaacattcaacttgtttaccaggagtcaaaaagttgaatgtacacaggatctaggaataagtcaaaatgggtaactgagataaggaactctgaggcctgtagcatatacatgacattaaatttctagcacttgggcatctaaaatttgaaataaagcatatctcagaaatacatagatacagatagaaaaagaaggggtgagaggaaggacaccaaccaattcactaatcatctcccatatgcttgctcatgactatcttctgttaattcagaaaaacatctgagtaataaaacatactatctgttatattcctcaagtaaatgcccattattcagtctcagtagaccattattgaatgatattaatacatctgtaacaataagtctttacttcaagctgcttgagccctgctgccacatgggtgctttctgccaggctacctgagttctgccagccaccacattaaggtcccaaataacacacagagacttatattaggtacaaatgctgcttggccaatgactaggatttcacaccttctagctcagtcttaactatcaaccataatcataagacttatcttatggaggatgccagaggtaagcaccctctcttgcaggcagatcacatagtggctccagagagcagagagcagagagcaggaggaagagcaagagaaaagggacaacttcctatttgtcgctgcttatatgagtctgcccgctatgtcacttcctgcctatatcacaagaattccttttattacatttcccagaatcctccttgactcctattcctgcctaacctgcttcttcattggccaacagtactttattcaacaaccaataagataaacatatacacagaaggacctcccccatcatacttccaagtcaagttaaagatgaatttgttccaggaaactaccttaaccacagcacccacaggaacatagctatcaggttctagacttcttgcttgtctcgtggacttctttctttgggaccagttctcaaaataaaatcaaatatgtatctttataaataaaaccaagtgtattgaaatagttgtcaatatattcaccaaagcaagttgtgtgcaataatacatgtgcttcttgattaaagcattaaaaaggaagatctagtagcaggcctactgagtactttaattttgaaacagtaatgagtataaacaatggttcttgatatctgccacaactgtaatgtgaaacaaacattacttctattactgccagtttgtaagtactgttattactattttggtacattgtacatgcaaaatattaattagaacaatattaaaagatgaaccattttatacttccatgttgacaacctgctgaatcctttccaattgcaccgaactaatatctcttttaaaacttttcttcattatatacgacctccaatgtaaatcttatttatttcatatatgcctggcaatataagtataatttctctatcaatatattttctagcatttaaaaattattcacaagcattagtcatctcaaataaggcatactttaatttttctctaaaagtttaaaattttttaaactgccagtttcatttttggtcagttctatatctttgtttaacatatacacattatttatagcatattaaactctggtcttgtgagtatgtgcatgtatttttgttttctcttgtctaaaatgatcacgttaaattacgctaaattacatacagtaaatgttcctgagcaatctgaaaatatagtatatgctgaaatgtttctatatgttatagcattgcaaaacatttcagtttctactgcacagtgaattcaatgtctagctgaaattttgatatatggaaatatatgagacatatggacatagggggaattagtattttgttaataactaacatttgatctttatcatgttgactaaattaaagtagtttttttaatttttttttaaagtaggccttttattctgccaaataagtacagccttttagctatctagtgaggaagagtttatttacccattctaggagatgtaataccagtgttaattcaaattccttggaaatgatgtgtccttaattgtttctttttgttgttgttgttttgttcctatgagaagaaaaactgtgttcatgagcaacaaaccgtgattatgcatggatggagtttagcactgtaatcaaatagaacttacaacaaagttaatctgatgatatatatttaatgctgtatattatcgatggtgctacatggtaattagacataaatggtaaacacctcatatgaatggcaaattgatgctacttttgcatcattgaaacaaacatatataatttggagtgaaaaagaggtcttagtgatgctagtatttttcagcatgaggaaagcagtgtttgggggagcagcaagagtacaatcatttcaccagagtagcattcttccttaccagaatgtcttcagacataagatacatccatagtaaccttaaaatctcaggttgccttctattggtgtatcattcaatcatacatcttaaatacctggcttttcacagaggcttatcaaatagaagccatgaaaacccagaagactgagactggagagatgggtcaggggttgaatgaatgtgctgttctcagagaggatctgagatcagctcccaaagtaatttacaactgtttgcaactcatcctcctgggagaacctggtgcctctggcatctagagacacctacactgacctaatctgtgctgggattgtttgcatgacaactgaaaagaacaaggcacaaaattaaatgtgagttagttatccttcttttctttgattgggaacttctgttttaaaatatgataaggcaaggtaggtatatttgtgacaccccaagaatgaaagctttttaatcttgagcctatataatgaaattttaagaggatgggatcatagtttggagattcaatcaatgtagccatacttgtttattacgttatacattttcctctaaacaccttggcagatgaaaaactaattcaaatatgacatatcaagttgttgaatttccagcaagtttaatttttaataaatattattattttaaaaatcaagattttaagtactttagaaaataaaagaaagaaaaactctcatttatgcacatcccatatatgaaactagatttcaaagtatgtatataaaaatatggaatgcctttgcttcaatattttataatatgtaaaatgtacctttgattttctttaaattatttgaatctggtctaattgggaggaatgaactgtttacagttttgatacagtagaaacgtacatagatgtttaatgaattccctaatttgttctggtctacattgaatacagctctatttaaaattgttacattaaatcttactttgcattctggggatgtaagagaagtcaatcaaatttaaatcctgcttggcaacttggtgcttcagaagtttcctacctgctgtgtggaggctgactttgaccagtctcacctcttcttgtatttgagatctctatgcatcctgctaagcctttaactctttctttttcaaacatctatgtgactggtaatattttccttctgtgtttcatctacattgtaccttctttttttttacaacatatttgttaaattattattatattattattaattctctccctccttccctccctccctccctccctccctctctctctctctctctnnnnnnnnnnnnnnnnnnnnnnnnnnnnnnnnnnnnnnnnnnnnnnnnnnnnnnnnnnnnnnnnnnnnnnnnnnnnnnnnnnnnnnnnnnnnnnnnnnnnnnnnnnnnnnnnnnnnnnnnnnnnnnnnnnnnnnnnnnnnnnnnnnnnnnnnnnnnnnnnnnnnnnnnnnnnnnnnnnnnnnnnnnnnnnnnnnnnnnnnnnntctgtgtgtgtgtgtgtgtgtgtgtgtgtgtgtgtgtgtgtgtgtgtgtgtgtgtttgtgcgtgtgtgtgtctgaatgggaacagctccatgtttcaagtcaaggaacaatgaacacacttgttgcctgcaagagtttaaaaataataaagcaaacctagttaatgctgttttcctacaagaggatttttttcgaacatgtcacattgatgtgtattatgatagcaaaaagtcagtttaaacccattaagccttaatcttactgtaaacacgtccaaatttaaaacatgcatgaggtaaactgtgatgcagacataaaccatccacagaaatatgacttgcttgtgttgtttatacaggttctctaatatttacagagagtatgggggaaataaattgttaaagttacataaaatgaattacttggtatgtgtttcctatttcaaacagggcctcacacatgtatactatgctatcattgaactggctgtgtagtcaagggtggccttgaactcctaccctccctgtctccttctaagtgctgagattaccggagtgagtaaccatgtgttcttgcagtgctgggaatggaggtcagagcatgaagggaaagcaaacacactgccaactgagctacaattgcagcctctttagacatttttctgaaggttacatttgttacttcaaatgtctaatattgaataacgtacaattcagattctattttggtaaagggggtacactatcactgatatttatcacaggagatgttttaagcttcaatgagataataaataccaattgcctgacataatacccaacgaaagaatagtctgccacatttacctgtggatcctgagaaaaatccatataaatgaaaactttagaacattcagctttttcatccataatatggctataaaagaactatttaatgggcccattatgaggatcaaatacatgcaattttgtgatatgcaaagaaagtcatatctataaatgcacagttatacttaaaagcacagtagttcaggcatggcagaaagaaaactggaacctggatcttaaagactgactcatctcaggaataaacagatatagacactacagattctcttatccagagtaagaaactatttttttcaggagaccattaagagatgcatctacaacttctatgaaagttattttaaaaccaaaggcatgcaatatacctgaattagagcttcacttagcaactgttcattaacctccaaaataatgttctttatttcctcgtatggcatgcgataagatcccaggaagatagctaaaataaaattagatattattagagacagaatagtatcaaaaattaaaagtccaattatatatatatatatatatatatataattaccactgtatagataaaaatatgaaatatttgtcacttatatactaaaatttagaattataggttattagtatttgatgcactattctatccgtataggcaaaatatcctatagcatctgcagctcaagtatacatatgtacaaaataaaattactacttagatctctcatgatgctatactcagggattttatattaagctgatacaaaatgatcaaccaaaatttaaaattaaaaaaaagtattaggtgaaattggtcttttgagtcgatctagatattttctttctgttttatttaatttttttcattttacataccaaacgcagttacccctccctttccttctctcagccccaacctctccctattccaccccagccactcctcagaggggggtaaggcctccactggggagtcaacaaagtctggctagccaagctgaggcaggactaagacacttcccactgtatcgagactaagcaaggtattccaccaagatcattactgggaaaaccacagtgaaagctgatccaagttagtgggagctcaaggattctagactgacagctgggggacctgcatggcagcaagctagcccctctgaatgtgggtgacagctatgtagcttgatcttttggggagagggctggcagcaggaccaggatttaacccaggtgcacaaactgacttcttgcagtcaatctagatttcaatgtcaaaatttttggatacattcaacacagaatttctaaggaatgacaacaaggtaaacatcactccatctttctcaatcttagtctaaacttattccggaggaagttgaagaaagaattagtgagttttgcattgtgttatttttagtagcaccatgaaattgcatgccatctcaccttgtctcctatatctcatctaacagtacatctgagaaatgcatgccacttgttccttaatcatcttatagctcttatggctatgatacgatatgcttctccaaacaactataatgctaactgcttactctccagtggaattttcagacatggagctttcagaacagaatgggtccagaagagatttgactagtcaattgtggacttcaagttaatgtactattgatactttgaatacattgctgaatatactattagaagatgagttaggattcaaagaatttaattggtagggcatgatctgaatcacatatactggcccaaactttccctctcatgatctctgcatcttgaccactctaaggttagtagccttgatccaccatgatactttgttcctctgccttgaagccaacagcaataaaaatgaccagccatggactaaaacctgaaaaacaatgagctaaaatattttttcttttagctgaactattcttttattttttgacaatgactaaaagtttgttataaaacagtagcctttggacttatcagattggctgtgaaagtatggcattgcttactttaaagcaacctatacaactcttaacaacaacccaaaggtttatgagtacttaagaagcccacttgaatatacaaaggagaatatcgcaggagctgcttttgggagcatatcattttctatcatcctgtgaatagtgatacaagtacaatgaggtattcctagggaaaagtgactgtgccatattcatgtaacttttctttctggaatgttgttataatcaaatttttaatttattattgctaatatatgactctgactaatttataaaataaactttacccaaggcatatacatacatacacagagacagacagacacacagcattaggtacttcttgtggtttcagtcatcaacaagaagttttggaacagatcccacacaaatatggtaggatactactaaactttgcaagagaagagctgaagtgcatgactcgtcaatgtactctgaatttctgctgactctcaggtagtgaactattactctcttcgtatactgaatcatgatcctgtcaatatttacttcattggatatattttatgtcatgttgggagaattcaactcatttttacctagaatagctgacaattacaaagacagtccttttaaacaacacattcaattccattctccattaaattcacttaaaaatatgggtatgcttttagaagtagaacctgaaatcacatattaatgttttttttacgaaaagctctggatgactgcactgaaagcaaaatgattaccgtttaaatggttgcctcaacatgaggactgaatgagaactcaaaaccttaaataaatctcatggacatatattaaccagaaaacaagatcatactgtgtactgaaaaaaagttactgaaaaacaactttgtgaaaaaaaatactgtcattgcagcaatgcacaaattgttgatagctattagtagacaaattctggagttgtattttgactaatgccagaataataacctgtttgctttatctaattctcaaataattctcccattactcttgtacaattagaaatgtagcatgtgttaaaacttctcagagtgttttagtatcctccgtatctataaaccttctttagtgatcaaagaaaatattctaaatccaattcagaagagagagtatgtcaaagtaaaacttagatgctggcttaaatggacatgaatttaactgtccagctatgttaccaataccacatttaatggctcagtgcttagctaaaggcctcaaggatcagcaaccagtcataaagtgcagtggctaacaatttaacaatatcacattacaattatattaaacaaagaaatagcaataaaaggacatgttcacactgactagggaatatttctaaaaaatatgaatctcagtactagtcagaaaaataatcataaaaacttaatattttttcaataccaacttatattagatttcataatgttcagtatggaagttttattaacaatattttccaaaactctaaaaatcataggtttcactgggttaaacaatgttcaatttttattttcttcattttggttaagtggtaaaaagcaacctggattatatttatatagtatctctttctttttcattattctctcatatattacatcctgaccacagttttccctccctgatctcctgacagtcctgctctactcgctcccctctcctcaaaatccactctcctcagtttaaaaagggacaggcctcccagggatatcaatcaaacatgcaataccaatttgcagtaaaactaggcgctactcctagtgtgaaatctgaacaaactgacccagtaggaggtttatatagaatcttgtttctaacagtttatctggacaaagaggttgtaaggttgtttacactgaataagccatcactaccacatctatgcaaaacatattacatacacaggttctgtgctgttttgggatccaaaattctcagttccttcactttcttctttggaggtccactcctattttcttctgcagcatctatattcctttgacctgaaagaaaaatgttgattcataaacaataatggtcctaatccaagtacatgaaataacattagtaggcatgttaactacattaataaaggtgattctgaaatcaatacatgtgtttatttcattagctgagggaagaggataaacataaaaatacagacctgtttagagctttgcctacaaattaaatatcagcacttaagcagaaaagataagccaaatagaactaaaaatcaattgctgcttcttccctaatgtgtaacataaattactcctttacaggtaactgtagcagcactgggattaaatatgtagtaaaatctcactaatttggactaattgaggaaagaggaagacctgcctcctctcctaaaacatgttaatatttagatatgcatttaactcagtgaaactgctttaaagcacctaaggtaccttaagatgctaaacagattgcaacagaaacctcccgattgagactgatatgaagaataggtttgaagcatttgtgagttgtaccagagtaccagttatttgcatacacaaaactacatatcctcaaagatggatattttgagtctgtgagttttgtcttagttaccattttaaaaagtattcttggaacaatattattcactgtttcttcaaatgtttgaaagaaatgaaacaaggagtgtagcatcaaggagagtcattaggccctattcacccttcaaagacactagtgtcaaagcctgcggctgtctgctaagaaaatgaagcatgaagtgaagtccccaagtcccatctgcatagaaacacttcaccagttgcgcaagtacttttggtttacttcttccttgataaatacaaggctgaaggcattgggatcactaaatcatgttagacatgtaacaccaacctactttttcaaccaagggctttcttgtgctcaaatccatgctgctaaatttcattcatccctgacttttacaattatgatcattgatttttattattttaactcatttaagcttggtgaaagagttggcacagacattatttcctttaatagtaaaaaggtgacactcaataatatatctttttaagaaaagatatcagcctcagtgacacttgagcaatttcaaagaactcgtcaaaaattttaccaatccttagatttcctttgcattaatggtctaacataaacaaattctgttaccttagcagactagttacacatgaaataaattaactatagaacacaatattaaatgttctaaggtttaacagaatgatcaatacaagaatagacacagtatgatgagactagataataattcccttgaaaattatgatttttgtgacaggtatcaagttctttgaaatgttgccaaaacacaatcattgggattggtgaaagaaaaattacttctagtatatttatttaaaagccatcataaacgttcctaaaaggatctttctgaaagtacagtgactttcttatgcaacagtcaacatttcaatttattctaatttaagctgttctcagcttaagacaactgcataaagaacgaaatgacagttcaatagctatttctgatgtcaataaagaaaatttaaattatatcaaaattacctctggaagcacattcagaaaatttaacacaatcaaagaagtagtcaagaaaatgttcctaacttcaataggccttaaactctgctacagaaaactaattagacatgaacatacaggttgaaatactgtaagacaaaggatgtgggattattatttataaataaatggtgttctggctgagaggtgaacagaacgttcattaatgtccttttacatacattaggtcactggttctccacctgcatgggtcaccgccccattgggggacacatatcagacatcatgcatatcagatatttacactacaatttataacaatagccaaattaattacagttatgaagtatcagcaaaactaattttatagttgggggtcaccacagcatgaggaattgtattaaagggtcaaagagttaggaagattgagaaccactactttagctattatttttcattaaaatctagtctgagctctttgattttctaatgaacaaaattttcgacattacaattagatagcctacatatctgtagctcatagtttcctttggagttgtagtctattttacttgatgaatataacttgtctaaaaccctgagtctagaacgcactaagcattccatcagtgggaactacagttttgaaaatcaaagtagtgcagcaagtttaaaatagttcccaaactaggcacgttttccaaaacaatggctatttttgtttttatccctgtttatttatttattttggttttaatattccttacatatcaataccagaggctcagatagagaattcaaacaatagtgatgagacagcaaatgtccagaacagaatgtattaaagccattatttgttaaaaactctcttttctagtgatctcagaatgccacttttcataaaccaatttaagcccatatgattctaatgcacacaaacttttaagaattaattaaaccaaagctgtaatgactgaaagttatttggataacactgaagagttattttttgttttagggttagccaatgaatgttcttgtatttccttaaatatgtgggtatttacatgaaattgtattataaatttattcttttataaacaagggatgctcatcatcatacataaagaaaatatgtgtataagcgttctacaatctaatatgagcaatatttagaaataatctttaatttctggtacattagtgagtgcataaaacatttgacccagatatttataattatgccttaagctatcttaaatgggtaacatttgatgactcatttggtaatacataatcttaaaattattgttaatttttaacatatcaaaaatccccataagatagtttcctaaaggtagactcaatggtattcatttacaagttcaccaagcagtcctagtaaaggtcttaaggtatcatctggtccttctaggtggtacttctatggctttgctacattagtgttcgtaattttctactctttcaaaatagaaataaaactccagactaaagcatataaaagttccagtctctttctgcagtttataaactgctagccttggaaatcatgaggaacaaatggaggaatcacaatcaacataggaaagagggtaatcttttaaatgtaggtaaagtttactcagtttggcaagcaacaaactattcaagtgtgttcaattgcctttgtacagaatagcaaatttgtttacaaaatcttgaaagggaaagatgatgcaatgtgcagaaagagattgcacttctgtcttctcattcatgctacataggacagctgcaaagtttcccctttgccctgctgcctacagctgcaaagtaaagcatcctacagaaaagtagattttacctcgacacctgcatagtacctgaagcaataggaatggcattatcaagagtgttcctgaagttcagtgcacattaaacaagactaatggtcctaatggtaggaatcacacacacacacacacacacacacacactttgtagtgatttcctaattgaggaacaaatcttactagttgtagtttatacaagaaccccccctccaaaatcaggaagcacatgttactgcaaattaacatctgcataactaatatacttgtacacctgttcattaagccaattactgaacactgttaaatgtcactagaacagtatgtttaacaatgtgcatagctaatgttgtatattttcaaatcagcctgaatatcttggcagatattgtatattttagggagaacaaataaagatgtctttaggttttagggataaactttgtttcagctggtaatttcaaaatccaaatcaaatcacagttcttatttcaatgtagaatttgacaaatgaggccgaaatttttcccattaacttttaacctctgctaagtacataattcaagttggagtctgggacttttcccacatttcctatagttttctatgaaccaatggaaatctccctggctgttgtatctattaaaacttccatgttatgttaaaaaacataattcatgtgacaacttgatgattcaagtaataaaccacatgaacaacatgtatcaaatacagaagactatcaggaaaagtacaactgcaagaaaaaataatgctaagttctagtactggtaggctattagggcatttcttattgagaatatggtttggacaagcatcatacacaagctgctctgatttttgtggtcaattgtagattactgcaaatcctatagtcaatttggcttaatatggaagacagttaattttgttaagcaagatttaatagcacatatataactacaactaggcttgacactagatatatttcccccacaaatggataaaatacttacttttattagtcaaatacataaaccaggtagctttaaacaagaagcaataacttcttcatacttctgaaacaagttcaagatcaaggtgttaccaaaatggtcaccatttactgtgtgtttatatggcctttcctcagtgtgtgctagggccatagaatgagactttctggttatctccttataaacacatttttagagccgaattatgtcttatatcttaaagtttgattacttcctcagaggcttcataaccaaatagcatcatacttcatagtaatttcaaccagtgaattttgcaaggaaccaaatattcagcatataacaatactaattattttacattattgcaaagtgaactctacagggacaaacttgtgaaaggccacaaggaagagttaaatggctaaggtatctggtaccaaattctcttctctcagcactaagttccatcatttcccacaagatgaacagctgagtgtcacatgtttataagtaaataactgctgacaagagagttcactggagacactcaacatatgttataacttaattttcctaatagaattctttatgttgtccaaagtatgttgctgtgtatttttgagcactaaatcaaagctctttcttttttctttgcatggcatggtatcctcagtttcataaaatgtaattctgaattttgtggccagtgatcttagtaggaaacactctgtattctgttttgtttttgttttttcttttctttctttgtttaaaatttaagctactcgaaaaggaaggtaaagatttgacatagaataatgaggtcaggtatgttttcattcctgcctaatccagcctgacaaagtgatgtctctgtaatgtatgaataaagaattttaataagaagattggtgataatgtcagagatctaagggctcacagaaatctctagatgaaaaaaggggggggtaattgagggtgacacagcaatgctcataaaaggcacatgctggcaacccacattcagaggtcttggttcagtccaatgctgtttccccagctttatgactagggtctccatgttatcattaagtcaggtcaactgtttctgagggtttctgcagcaccgtcttggcttctttgctcattcctcctccctctccacaattggattccaggggtattcagtgcttagctgtgggtgcctgttactgcttcaaatatctactggatgaaggctctcacatgcatgagatatctcaagacaaagaatagcattgggctggctgaccacctctgccatccttttccaatctcagcatcaacagggagagcctttgaaaactctagggtaaacagatgtcactacagtgaaaacgtacatactaaggagaaagtattagtaactgtagaggtaaaagatgtttaatttgtcctggcaaggtgatgcacagctttaatcccaacacacaggagacagaggcaggcagaactctatgaattccaggtactcctggtctaagtgagttccagaacagccagagctgttacacagagaaactgtgtctcaaaaaaaaaaaaaaggtttaacttgttattatcatatggcacccatacctgtttcctaggtagcctacaagaagtaaatagaatacacatgcaaaagtttcacagtacataaaacacaacacatggttgtagcaagtgagaaaatatttttgggttggcagatcaaagtgtctttgttccaaatgctcaactcagcttcattactgtgaagcagccatataaaagaagaaaatgaatgagcaaggaaactaaaatatatatgtttgcaaaaccacatgtccagatagatttgtcatggattatgtaatttggttgtatctgatataagaagtacctaataaatcactaggtcctcatctctttcctttccaaagaggtcaatttattcttatttatacttttgaaaatgtgagtaaatgttaaacactttccttgcaaaacaatgtttagaagtgtcctaatatacctgttgattaataaatctggttttcaaaaagcattgatataatagatcacattttttccctcatcatttttaagtttgtctatcctacagggatcagtcatctgataccaaaatgccattttgtcttgctcctccaaaattatcatataattttactatatgtcttcatgtaaaataatcacaaaagctaatcaactttaatgaaattataaaatcaattttacttctccattattattaggattgaatatatttgataatgatttacttgtgagtcactggtttaaggcaaactaaaagtgaattctacacacaaaaaagcccacatagactttgagttttctgtaatatttttctcttgctttatgcacataaaagtattactgagtgtttcaatttggtttgttgctggctgagctcaatgggaaataagcagagctatattgtctctgtttttgccatttggattccaaccgctttcaattttatctttcagcagtaattttctttagttcggaagctacatcaatgtaatctgctgaaggtgatcgaagcattaggaaatctttttgcaagggtaaaatagagtacctgaactttctgcttctttctttgttcttaaagttaggtttagcttgctggcaacttttgatttgaaagcagaaaggtagtatttgagactcctttggaaatgtgcaaacatgagaagaaaaaaattcaaataagcataaaggttctattcttaggacagactcctgaccctcttccttctcagcctattatccttccctgttacatcatccactattttggaagaatacctgacacattgccttaattcttcccttctcctctattactttgttataaggtgaattctaattatacatttaccaactaagaatgtcagaatctccataggaaaggtcttgggatggatatatctttaaaattccacttattattagaaaagtttgaatcaactattctaaagcatatttaatacataaacctgtgagggctccaactccaaattgaacaatgtgaaaaactatcaatagcaatccccaaaagtcttctttgcatttactctaaatcacagatctaacactaaaggcagattcttggtcaatgcctgctgatctttaatgccaatgatttacatagttttaaatcatttaagaaaaagatgtatctctaaatcaagaacgatcgatcccatccaagtactaaccaggcccaaccctgcttagcttctaagatcagatgagattgggcgcaatgaagatggtatgtccataaaccaatccatatatttgtataccatagaactcatatatacagatttctataatgaataggaatgtattttacacattaattaaaactgcacatataaaattctaaagtggatattgcattaattgcctctttcctttgtatgtagatagttgtggccatcacaagagtagaagtttaaaaaagaaataaatcagccattggaaagtaaacagtggctaaaaaccaaacttcttacttttgtaaacatttctgtattatctagtaacaaaacagccagggtaggtaaggactctgagtatataaaataagaagaagcattttattgtataaaaactggattcttcaaaatgaataaaagactatttactctttctcccgaggtgaaaagctaaaatgctaagaaaacacaccatggcaactgcacactatatagccacgttcaagtctatatgttttagaccaaaagatttgaacactaatataaaaaaaatcttatacaagacataagcctaataatttattgagaacaattaggtgttgcttactgtgcagctctcattaacttacgaggtgacaagttaaataacagaaggccctttgctatttataagagcatgtataagataaaggtaatgattaagaaaaacattgcttgactgtacaccataatctcatgtgtgactaccaaaattcttactaggttttagaaatgtatataatgcaggtagcactattacaatgtaaagttaaaacacatttcaaaagattgaagtgaaatcttcattgtgctaggataaagaagaaatacctgtaatttaaggttttaccacaaacttattaaagataaaaagagaaagtaacagcccagataagaagcagctgctaatagtcacagatagcaaatgaatttgacaggatcaggacaacatcctgctggttctttttcctcctaaaccatttcaaacctgctgtgtttgccattaggctggcctttacttcaccctagccacttcagtcctaacactgtgggggatcattgttgcttccctatggctactgccaaagtgtacctctctgcttttagcctggaatgctttgaatctaaacgtaagcactggttataactacagagaaggggcaagaagtcaatatgtaaaatctgaaagagaggtgtcataaacacacacacacacacacacacacacacagctttaaattggtaaatggggcataatacatttctaaaatattacttaaaagcatgctgaaaatgtgcttcctttattgacgttttcacatatacaaatgttaaagtgtaacccattcatctatataattaatatgctttaattgttaggacaattcatggaaaagaataaaacacaaaaatgttcctagctttgcatctagatcttatgaaaacaagcctggtgagtcattaaggacaaatttgtgaaacactgcttagtaaaaccctcacatattagatacaataagtgagaggcaacacaggacagaaacaattatgcttacttcgaagtccttcaagtcttagtctcagaatagttacattttaaataaatcatttctctggagtgagttaatgctgtgtgcctaatacaggtgtaagaaattgaagctttctaactgtgagttctaccactgtatagcaaagataaatataattaaaatagagggttgcaataggacactccagtagccgcaaaataatttgagcttacctccctnnnnnnnnnnnnnnnnnnnnnnnnnnnnnnnnnnngtatggtagtctctattaaacactctctacttactttatcttcaactaaggcactaataatgcccttctattatcgatcaactccattaatacaaaggcatgtaccctattgtcttgcctgtatcccaaattgataacaaagggagtatgcttcaattccccatcaatgtctcctccagaggaataacaagtttgagagatcacagtgaaaagaagatgaagttgcagcagaatgagtgtgaatctgatgacaatctgacttcagaatgttggcaggaaagacacttaaggataagctcagagcagaaataacagtccagacagaaagcgtaatcaaaaaggtgtgatgaagccagacagcggtggtgcacacctttagtaacagcactcaggagacagaggcaggtggatctctgtgagtaggaggccagcctggtctacaaagctatacagagaaacactgtctcaaaaaagtgtgatgaaataatgtgtgtgaggtccccaaagaaaaacagaacatagttcaataggagaaaatgacaatatcacaccacaggaacgtcaagcatattgtaagtcttacaaaaccaaacattccagaagaaaacaggtgattacagatgctaagcaatgatttcaaagaaactattgtgatgcactacaagaaacaagaaagaaataaatggaaacagtgaggagatggcactcacttaagatacttagtgggaaaattatttctatctatggtgtgaagaagacaaaatgaatattacaagaaggtacctgattttcaaattcaagaagcatttctatgatacaaatgatttcagaacaaattcagcatacactaatttactggacaagatcaatagaaactgtgcaaaagagattatactgttcagtgatccatgttgcgtcaatatctgtaatggaatgagacaaggtgatacaatggcccaaagcatcctaaaattgctcttcaacaaaattaaataggaaaataaagtttctcacagacactaagtgagtaccacaccttctttttgcctagcagaaaaaagtaaaacacttcccatgccatatgaaaagtagaatatagcactacactagttagcatcagaacaaaatttgatccctagataataaaggatttatgccacgaacaaggctctgtgaacattactgccaaagacaaatgacaacactatctatctatgtgactcaagaaatgaaaaaaagtggtttgttcaatcgacaatggtacagaaacaagagctcatgccactttattggcacagaaagagttactagatagcatactgctaataaaggttagaacaccactacttaactttgtcatattgaggttaaagtgaaatatgagtattaatctacatcattagctgaaggacagacataaagtggctgtcatctcattgcccatggtgtcctgaatgtatgaaatctgacaatatataaacctaatattagttattaaggcttctccccaatccaaatacagatggatcagtgaggtggcctgccaataagacaacaggtggctctctcaacttactgattgcatttgtggctttattaaaaaagatattccaaacaaattctgtgttgatttagtgaaaagacatgctgtctcaaacaacctcaatgcaatacaattaaagacagagtaaatttcctggtgttggtggtgcagagatcttacaccaggagttagaaaggagttccaagaaacagtcactgtcattaagtaccctgggacatccaacatgatgccaaattatcacttcaattaagtctttaaattgtgtttgaaaggtggttgtctgtatcatcctatgcctccttaagcagagcatgactatcattcagtaacagcacacagatcaaagtaatacttctttccctttctaacagtatctattaatgacattatgatcatatattttatttaatgagtgtcttactcagtatatttccactctgtgatgaccatgttacttcttcaaggtaaggatctcaattgacaaactgcttcctctagcacatttacctactgttgtgtatatgtgaatgggcatgcaaatacaaaaggagtaaacagcgattatttgaaacatctgtatatgtcagttcatattccacaccccccactatgcaatctaaaagagtagggagtaaaataaaagggattctttaactactggtaagcataccataaatagcaaaatcgactactacagatgataaaggagcagcctggctttaaaaaaaaagtgtgaatcaatcaccatatccactaatgtatattagatagtaatacaaccatgaggcaatgactcaactcttccaaaagatgcctaataagtaggggattctgtagcattctttaaaagtgtgtggtcattattagcattaaaataaaggaccttggtatagactttgcttaagcaattctagtaattaataatccacatggaaaaattgcacacagcttacatttccatatgaagtagaatttcctaatatacaatatctttggaaatgacttaccttatgacaaaatgaagtgtcaaaaataacaaaataaacctagcagatttaataagagagaagataccatagtttggtcagttattaaatgctgcagtttatcactgctaaaggccattgcagctgaatctgcagtactcagcctcattaaaacttagccttttaaaacaagtaatcaatgaagctgaaacacataaacatacatattacaaaaaaatctacacgaagctagaaaaaatgcatgtattgtttctttgaagctaagttaatcaaatttctattcctcaatcttttctacaatttatctcactgactcaaaatttgatgttttaggattcaagacaggagcaacattgttatctttcaactctattaatatacactatataaatatatatccatttatactatattaaattatttatagtatttgttcttgaaatttcttctcaatgactttaaagccaagacttctttgatctattgtaactttcatgctacacagctaaaactaggtattaacatgtatagctacaaaaaagaaaaaactgtgtagctactatacttaataatctacaaatatgacatatacttaaattacttaatacttcaatgctgtgatttgtaatgttttgctcaatttttgttttgttttttttctactttactaaaaatgatttaagtgttgcctactggtttaccttatagaaatattaagatgttgttgcttatctttatttgcttctttttacctgtagcataacacttttgactttctaaacttgtgtgcaaataaactcagaacccctagtttcccagtgttcaaaacacaaaagaatattcaacaatcctggatgtggtttttaatttaaacagaaactttctcctaatcactaagatgtttctctcgtactcaagatttcttaaatataaattaaaatcaatcatcgtttaacaagtcttttacaacaactgtattacaacttgtaattacttgtattttgattatgatgcatctaagaagcagccattattaattgatgtgtattatatttcataataatgaatctgggtttctttttaaatttcaatctttagtagaaaacctaccatctagcatttgcatttcccttgtaaaacacattattggtggcaaattttcctgtggcagaattttctagtgtcaagtcacactgcatgacaagcagagcttctgtgaaggctcctagagcctaaagtgactgcaggtaggcagatttcagccaaagctccccagtcataatctgacaaatcataagccaaacacacaaaagtacacatgcattcataattagtggttcattcataatacaaagaactgtgtagactgcatttatgttcttttaaatttctccaatttaatgcattattactttacataagaatatgaacttagtatgatgcattggaaaataaaactaataaaatgtgttttctacaaaatgtcacaagaattattctgattaatcaatagagggctatagtaatatcttttaaaatgggcattaatatccagttaaatttaacaagaagatacaaggtatagtattttctctattcaaatatgaattctttcgtatccagaaaactgcaaaataagaatataagaatttggaatcaaacttgaatataaaaattcttccctgaatttttgtttctgaaagtatggtaaaataaacaactcgaaataatattctagtgaagagattccatttctctgaatatattaaaaataatgttaaatatacagactatcaaataaaggaagcaatacccagatgccaaagagaataaacattagaaacagcagctttaaccttgaatgaagattaacttaagcttcaatttacaaagcctaaaagtagaggaatgaaaaccaagccatgggcctgaatgaagtggaaatataagagaaaattattctggaaagtactgtggactatacctcagtttaacatcaaattagacatcgacatagtcatctctctggggggttgaaaagaaaatccatgtcaatccttgccgtggagtgaaaattgtaaaaattttctttcagaatccacaagtaaaaaaaaaaaaagacaacctggatacagactaaactcacagatgtatatcagtataaaagaaaagcaaaaggaaaaagtatagcctgatcctaggttgttagaatcatagtaaaagaaagttaatctttgatgaagatcagtagcccttattaaggatttaaaacatctacagaaaatgtagaaaaaacacaaatgttaagaaatataacaaagtgtaattacagaacatattaataaataataaaattagtagatctgtagatatgtaacagaacgtaatgaaattacctaaagggcttaagaaaaaacgagacaaagtctaagatatgataattactatacttcttatatttgaaaacagcttctgttgtgttcccaagaggtaggtaggtaggtaggtaggtaggtagctagctagctagctagctaggtgtgtgtgtgtgtgtgtgtgtgtgtgtgtgtgtgtgtgtgggttaaaaaatgatacacaccagacaaaacaaggtatgctcatcaagtgaaatatagagacaaaggaattatccagagtatatcaatgatggaatatgagaaaatttaggagaaatggagcatagaatgagaaggtataattcaaaattataatttctaccttctagaatgtgagaaaacaataatgagtgagatgcatagaaagagtccacatgtaacttacatatctttacagacctttttgtactcataaaagtaaatttttatggactgtgaattataggagaagggaaaggtgtatataggtggttttggagggagaaaaaaaaggaatgttgcaagtaaactataatctcaaaagttttgtaaaggtctactaaaacatttttatgatgggttatattactttggttctataccaattatatttataatcattatataaaacttataattgaataaacatttgagttcccagtttgtcaagttttatttatttgaagaacaactaattggagaggtgattttataaaattcagattggtccaagcatcttgcagaggctgtcttatcaattatatagaaagtcagcatctcattccacatgtatgattctaacacaagcacaagtcacacggctgcaattttcctttaccttgttgagataataatacaaatatcacattagccatagaaatctatttatccaagttcatggaatggagatataatttaaaagttaaagtagttaagccattaaatgacttgaggaggaaaggaaataaaagggagtaagtgaggagggaaatgggaaagaaaggaaggagaaaaaaaaggcaatacaatagcaacaagatacctagaactagatattgcctaaaatatcaaactagaggataggtatctttgagtccatctatgcttctgcatattatataatccacattctggaagcatctgttataaacagaacccttaaactcatcaagccatcagctgtgtgatctattcacttattccaagcaccacctgcaaaaaattgcaaattgtatagctttgttcattaaaaaactgcctatgttgaatttctaccttccctgcaccataagattaaacagccctgacaaaggagattacacaattaagaattaaaatcttaataatttaatcagtgtttaatatcaccttacttatatggtagctaacaagaaagggaaatagttattttctatagaaattcaagactccttagacttaaaaaatggacataagactagttactttcacattttatatatgtgacttaagactaggttaaaaaaagagcatcttatgaatttataactcctgatgctattccacaggggcagctgctgagttttgaacacaggacctggttcaggttatacaattgctctaccatggtgctattatcatggtctaaaactggtgctcacaacaaaataattttggaaacttaagaatcatatcatctacttaattccacaggactgtcaatttacatcactctaccctagattcattacttaaaattcaacaaggaatttagctaagcatatttgatgtacaggtattcaatggaaccataaaaaataaaatagaaagaaatgacatgctttacaaagatgagacaaatcaaaggcgaaagaagtacccaaagtcctaaatcagatggacataataaataggatcctcaggcaatgatctggtttaatgtaacactcaaagagcataacaaagttcttttgttcccttaagctaagtgaatgtctttgtatagtttcacagacctgacacattttaataaactccaatgctaactccaatttcattgttagtggtaagattatttcctcttcagaggatgtaaaaaaaaaacataaaaacaaccaaatatccaaacaaaaatctacatgtttaattattgtgagtaattcatgcagattgtttgattccaaatgaaattcttttaatatactttcctaattatgctactgttgtttaacgaactatgcaagaatacatgattattcataaagcaatggaaaataaaaggaaacaaagactcaaaatgtgacaacgaagagaaaagacaaattgaaaagaaacggtggcctcagacacacacagtttgtacatgccagaaaaatgtttaaaacagcaacatttaaccatcactattataatagaggaaaaaacatatcattaatttcaacatacacttcagaaaaaaactgaatggttattacatgggatttgaaaaaaagtgcatctacagacaaaaccaattgaaagtatacttgtttttgttaacagttaaggcgatgataccagaagaaaaacatcaaatgacatcatgttatcaaccttcagcccaggcctggttttagcaacctaatgaataatgtaatgtggaacactaatctaatgcagtttgtaaagaaagggcatggactctaccatgaacttcagtggaaagagcagtaattctaatgaacataaaagccagagagcctcttgtacagtgctttgcatatggtaagtgctcaattactagctcttgtcaaatagaaagtacgtgcagttcatgattgtagctgtggatcactgtgtgcctatttgcattaatatcagttagcatgcctgggagaggatcgggaactaaaacaaacaagcaatttcagaaaatagagcagaatattgaattcactgaacatgtaaaaatttattggagcaaatagcatttcccaattacaaagtgtttacaaaaacaaagaatcaacatttagagaaaacgttacaaaattctgaaggtgttaatgttggaagtatacaattaaacataaagtaatttaagatgtttaatcacttattatactttatggtgaattataaaagatttgtatggtggtaatgttttggagtagaaaaataccctgcttgcttaataaaacttaatcttattctgtttgatattttcatttctcatttaattgagttaatggagcaacacaattacagtattaatgcatggctaataggcaaatcaacatttttccatgtttgtacaggtaagtattttatatttccatagctttgatatacctcataattaaaaacattgattggttagaattaagctacaattaacacacacaaacatatatatacatatatacatatatacatatatacatatatacatatatacatatggaacagagaaatgggtcacaattaaaaataaaagttccaaatttaccctaaacaagaaacattttcatgggctatgattttgtattttgtactgtgctaacttaaaagtaaatgttcaattcttgcattccagaagtgagaaatacatatacagagcagactttcatacactgccccaagaataggagatcagttttccacagaaaatgctggttttgatagtgcagaagattgactatgagataaaattaaaatgtctttttcttgatataatgtaatagttttaaaattagtggaatgttacaacgacagtataaggtaattgtcaatgaaaaatatggtagaaaaccaaacaccaagatgatttattatgtgctggaaagttggctcagtgactatgaggggaaactacacctgtacatgatcagagttctgttcctagaaaacatgttcggtggttcacaaccgtgtataaacccaggtgcaagttacccatacacctctaacctctgtagacactgaaaatttgtgtgcatataccccagcatgcacacataattaaaactaacgtcttttaaaaagcttattggactaataaaatatgacccaatgaaaaattaatcccagcactctggaggctgaggcaggtggatctctgtgagatcaagaccagtccggtctaaaacagctagttccaggacagcctccaaagccacagagaaaccctgtctcgaaaaaataaaacaaaaaaaaagacaaaagaaaattttgccacaaacatactggtgacagatagaagacagatagaagacagacagacagacctactgacctatcagccaagccagagatcttggtttggtgctgccgtggcatgcatggtgccaactcttatgtgtgaagacagtactgtcaggtaattcaaagctctttataatcactatggaaaatcgatagaacataggtgaaggttttggtaaagatgtgaaacttgcgggcatggtcagggtgctgcagagtgagagtttcaggtggctgcgtttcgctttcactttcacctttcggcttgcttctccacaagacacttagaaatttcactggaaaaagaattaattatagactcaagaaatcatataataccatggatggcaacggaggcaggcagatattgtatacctccaagttcaatagcaagaagattaccttctgtctgatcagaatgaatttagaaggaaaaactggacatttgtaaagttaatgctctcttcaagaagagaaggcatatatccttctgttgtgtgtgtgcacatgattttgtggagaggggcacaggaacatgtgtgtgagggggagggggtgtacatgagcatgtgaatgtggatgctacacaacagcattaagtatcttattatttatttactattttcgtggttttttttgagacagggtttctctgtagcttttgagcccttccaggaactagctctgtagaaccggctggcctcgaactcacagagattagcccgcctctgcctcttgagtgctgggataaaaggtgtgtggcaccactgccaggataagtatcttacttatagctttccaccatgatttttggcttaccaacatgaattttctgagtcaagcaatgtcactcaacttgaggcccacagacttggataaactggtcaataataaaagccccaatgttcttcctatctctaccttcccccaggaacaggaatataggagcatactgccatgctcggcttttatgtgggtgttgatcatcaagtttgggtcctctttacttgtgctgcaagtattttaccaatatagttttatattctatgttttattttgtatttgtcataactttttgagtctcctatatgactaccaagtttacatcacttccagcactccatcttttgcttcaaacactcctaatttcctctgtgattactgagctcttaattatcattgttacacacacacacacacacacacacctacataaaaatacagtctgctgagttcatttaatcttggtcatatgtatatgtgtttagacatggtcagtgtggaattatatattgtatatgtttattatatgagggatactgtgtgaatccaatgtattaaactagagaattcattatatttgtagttaaccattactttcattccacttaacataccctcacttaatgtactagctgaattacataaacacaatggaaatcttcattgtcttacttctaaaagtacatgaagtaatgtttaatcacttatttgtttgtatggtaattgggttccagttatttacttttcatactttccttgtgaaaaaaagggaatggagttgcaaaattcacacataccaacttatccatttttaccacaaacgtcttaatttacaaagcaacttagcaactcattcattctgcctcacattcaaaacttcatgatacatacacaaaatctatccaacaattcttgactttgtctttttcttaaattatccccaggacactagataccattgttacaccttgctcatcaataaatcatcaatcaaaaccaaaaaaaaaatcatacatacagacacacagaggcacaaaacccagaaactccaatgaagccctggctttcctggaactcactctgtagaccaggctggccttgaactcatagagttctgtttacatcttcgtctcaagtgctggggttaaaggtgtgctctatcacatgtcaccaacaccaacaatttaaaagtatacatcaacccaacaaatcccaattcatttagaatacctgaaatatttcccctatagttccactttatttggtcaagaaccccaactgagtatatcatttggtcatttgttgtatttatgttttttaccactgttttatataaccctgccccctgcatcaattattaactatcaatgagaccatcatgttctcatcccgatcctcccttacatacatgactaatgcatttacatcactccccttaaactcaccaatgtcccctttccctttcagacttatgatttcttctatgttatttttgctacacatgtacacataaatatgtgtgtgatatacatgcatgtataaacaacctactactgaacattgcttatatggacatatgtccagggatgatcacttgggattggatgacctatgtgggtactcatcttgagaggaaactgattcttcctctctcagcagccactgaccatctctcatatttcatctaggggtaggaccttgtggaatctttccatccatattggcatgtcaagtgatgttatcattatactaatcttgttgaagcaaacacactgttgagagttcactggcaaattttccctatgtagcaggtggcattctggtcctctggctcttaccatgttttccaccacctcttctgtgatgttccctgagatttacatgtaaaaggttaattggatgtaattctcttggcgttaggcaatccacagatattctctgcaattttttgcagcctctaattggcagaaggcctccagatatttattcaacaattccatctcctttccattcacaatattgtagacagtgaattcatatagacacattttatgtggcatcattatgccaatggtctgtaactaaacttcattaattgttagaattgaagattcaagatataactacttaactaatagctccactgtgatgtctaacacataacaccaattaataaaagacaaggaatatttgtttattctcgaaatttcacccacctccccatttcaaaaacatgtgcagtcacattgaacatggtaaaagaaacagaattactttgtgtttattttttatcacttatcctacatagtcaatttattatcaaaactcactgaactaaacaccaaaataactgtcaaagcagccaccacttttggtgaaactaaggggatttaagaaccatagaagccagcattataacttcagttgaaaacatggcgtagtcaagtaagtcagatgctgctgagaagctaaaataaaaattttgaagctgaagctgatattgaagggcatagactgttgttgttgttgtcgttgacaaaagaggaaagtagaataatagggttcaaagcttcactgcaatgacctgaatagagaagacatcaatggaagagaaactaatagcgttacaggtgtttgtccaagagtatacatttaaaaaaaaaaagaagaagtggtaaataattaaacaaattttaggtcaagagtgtttttttttttaagaaaagataaaacagacatagactgtgctgcttaaaatgatctggtgatgatggaaaaaataaatcatcatgtaatgggggaaagatgtaatgccatggtaggtaggggcaggtgaaacaaatgaataggatcctacagattaaaagactttcatttatactaagaagaaataatatggagacagatgcaagacaacttgttgatgatgggggtcttggactatggcttctagatttgacaatgaattatgaggaaggctattgttttccagtacatgctttagagaatgaggcctgagcagataaagaagttgaaaagaaatatggtaaatattgctgtatgaacaaaacacagtcactaaaaggaaatttaaagtaaatcgagaaccagaacctttttgctcatatgcagaatttgagtgtgaattctttaggcatattccatattttcagccaaaacatcacagtttcatgccacataacaaatattttaaaagacaaagcattattacatattttctttgttgtatgctcaaactcaattacaacagttcacaaatgaagtaacaccaatgcagccaaaccattcggtctttttgctttctatctatttctgtatagagatgtcaaattttaatttgatgacatagaagaaagcaattaatatttaactggggtagaaactatgtccaaagcagaaatgtttctattattctgtggattaccactgcatgatgattgagaatgatgtcttaatatgaggaatattcatttaaaattgtatcaagtaaaccagttttatttacagtaccagcagccgtggctgaaatactttgccttccctttagcattttaatttagatctctctaaatgcaaattaggggaagtctctgctcagaagatagggaaatgatcttccatttttaaatatcactattgtattagtggtgttgtttcattggtactctatttacacagagccttcatgcatagccctcaaaatactttgtaaatattaaaaagcatggatgcaatattggctactaaatttcagaaatgtactactaaaactatcccccaggaaagatcaaatattgctattttaaattatatataaaaaagaaagaagatgtacttattggagtcccagaaatagaaatagattaaaacagagcaggacataagaaaaaatggaaaattagtctattttatataaacttggttatgatattaatgttctgctatgtgataaaattattgtctcatgtaccagaataaataatttgtattaaaaaagaattgttttgtgatttgacttgtgtgtgcatgcgtgcatgtgtgcatgcatgggtgagtgcatcagaatgttaacctcacagtctaggatacaaacataaaatatatccataaaccttaaaatatcccaagatatacaagttgctgtgctttgctctctcaattctaagctccattttaacctaaggtatctaaggcactccatgagaaaagcaacaaaagcatcagctcttctttgtaaaaattaaagccttttggggaaaataactcatcataagtcatcttaatttgaaaatctaagccgggcgttggtggcccacgcctttaatcccagcactcgggaggtagaggcaggcagatctctgtgagtttgagaccagcagtctccagagcaagtgccaggataggctccaaagctacacagagaacccctgtctcaaaaaacaaaaaaaaaaatgaaaatctaaaactgacgaagcttgcacacattcacaaaatggcattcattcaatagagaagacaactgtaaagctcactaacacggttagaacattgtcaactcttctgtgatgcagggccttgaggatgcccaaaagtttgattttgtttgtttgttttttattgttaatgttcacttgattttgcatgaaaataaatggttttgtggccttttttttttttttaaccagggccacctacatgaatcctagaaaagaactggcggacgtgtggtcaatagagatgagattaaagtaaaagacagtgaggagacagtaatcagaatgcatcataaagatgtgcagaattgacaaacaaaactgataaaacacatcttcaaatgcttaaataactaactcggaattgtcatatattctatactgtagatattgtcagataaatatgattttaaattataagattaaaacagtgtgactgtttaaaactgaaagcattttcaataaagttttatttacctaaaagatgcagttaaaaacaggcagatgatagataaatagacagacagacagacaaatagatattagttggctcataaaaatctacatatgcatggattacactgtggtatttcaatgtaggcatatgataagaaatgagcatgctaggttagtccaacatagtaacacttcagacatctatcatttcttcacatttcagtaaattagtcttgctatatgtgtaatctggaatatcctcacatagtaccaagggataatcaatcacttggtccacaacttggagctactcagagctaggccaacatatcaataacaaagcttctaaatcaagctttagaaaaatagacattttctttataaatttattatcttgatgtctgttttaggatgaaaactgattaacatgcatctctgtgagttattttgatatattcaagtgattgctgtgaagcatacttttcttactgtgataatgaatgctggaaattatttattcaacaaatgtagagattgatgacatcttctcagaaagccctttgaggatctcacaatcaatattacattccctatttaggattagcattgtaggttatacacataagtgaaaacatgaggtatctctagttctaagtctgacatgcattatttagcattatggtctccagttccttcaacattgactaaacaatagacactccttctctttgatagctgaacatgcaagtcaaagtacatcacattttgtttattcaattaattttctgttaacagattgattccatatttttgatatttgtaaggttgtgataaacatgtaaatacatattctattcctgtataaaatttcatgaaaatggaatcatttttattttagtcaacttctgtgagttccaactttagcaagatatttattaaattcaaactcatttatgtaggtatttattatatttttcaatacataaacaatatgtttgatttaggtaaggaaacaacagcactgcaatagtttctcactaatcaatacatatataagagaaattctatgaaaaaatttattaagtaaacttaagtttcctactaacttacatttcacctggaccaacaaaaattaattttgagaaaaacatcaatgttcagaatataattgcaaatttataactgggattataaaaagaaatcccatcacagaagggaaaatggcaacccagttctccacaaatgattatctgaaacataattaggtcataacattcccatttaatctgagtaaacactttacagaaaacaccctgccaggaaaccattctcccttataaaggcttttctcattcattacctcatttcagcactggatatgcatatattgtcaacttcctttatcatctgtcctctgaaaattttaaaatggtaagttctcaatgaatggtaccaggaggaagtgtaagaatgaatgagccgaagaagggctaaatgccatcaatacatagtcatcatcagtgtcaaacagagaagacaatattaatctcttaaaatccatttagatatagaataaacttatggattttcaaggctagtgatttatccctattgtccactgactatcccagatggaccacattaatgcacatgtgggagcccacaagtgactcaggttccatctggagtctattctgacttacaagacactagagttcaaacttgcttgctccagtctccatgagcaagtaatgattatgcatatggaaaagagcatgttatctaacaagcttttgatgccagctgtaggcacacagatagagaatgcagctgcttgctaggacccgcatgatagatagtgagcctggctgctcctccattcaaggacagtgcggggcactggttaactgattatgctgctcttctgcttcgcctccagtctgtatataagcaggttcgaaattaaacttcgggctgtctgctgtgctaaaaggcacggaacgggcagtcctcatgaatctatcttgtgtttatgtctctttatctaccatttctcaatcctcatgcccctacacaggtaacccagctgactccttggagctggccccggacatgataaacaataggaataaagtaagaaaagtctgttgaggcaaagtacatctcagtagtacaacatttctatagcattctcaagaccatgaactcaatacctagcaacagaaacaaaaatcagtttggaaaagaaagaggaggagagaattctgagattgttctagcattaacctttgttttatcctgttttaagtatgtgggtgtgggtgggtgtggatgtcttcggaggccacagattgtgtcacagccctggagccggagatacaggtgatttttgtaacaaacctcaggttttctggagtgagcaggaaagttcagatgcatggattcctttctgtaatgctatgattgtctttagcaatgaaactatttaaaatctgaagaatagatttttgtcattaggaattaaaaaaaaaaacaactctcaaaattactattgcttgcattggtggtgcacgcctttaatcccagcactagggaggcagaggcaggcagatctctatgagttcaaggccagcctggtctccagagcaagtgataggataggttctaaagctacacagagaaaccctgtctcagaaaaccaaaaaaaaaatatttatcaaacaatgaacatgtaatgataaaatattaacatttgaattgctaggttacaatgaaggcatgaggaatcaaaaaaaaaaaaaaaaaagagaagaaacgcaccacatacattattgttttgatttctaaaatgcagtatgtatgttcctacaacaacatgtataaaatgatcagtcgacatgttaaaatgtaataataaacttgagatgtacatgaaatttaaaatatatttgatgcaagcataggcctcacatcagcagacaagataaacggctttgaggcattcttgctcagagctctgacatctgatgatgtgaactacagtcctgtctggtcagaagagaattatatatttcatcggaacgttccaattatttctagacgtcaacttaccaagctcagaaatgacggcccccaaaaaactattgcagggtttataagtgatacaatactgaaattaactgaaatatgctttttaaaattatataaatggtgaaagcattttcttttttctgactatgttaacaaacatgcaaatgcaaatgtgttttataaatgttttccataataatgcctcagacttaatatgactataaaaattaaaaaatgttcgtgtatacacacacacacacacacacacacacacacacacacacacacacacacacacaaatgcatgcatgcacacacacactcacaagttgagtattttcaagtcttatccttaaaattttgtaatggtaaaaaaaatgcaactaaagcattgaatgaaatgttacatgtttagtctctatttttacatcttcccagcataatatgtctatcaacggatcaccaagttctccattcttcaggaaaggatgtgtgcatgagaaaccaagtgaaaacagtttttttctagatctctctctcatgtaagcaatgagaattttacagcatgaactataaggtccattaacaatttgatacacttcagtttcataacatagctctgacccccttaatttcaatatatttgcctgtcgtccatgcttactagcaactccacaaccatgagctccaaggaactaaatgtgcattaataggggcctccttcccaaagcaggaaaaactggctcagtaccaaccacaaagataaaagttaggaggggattgaaatcctgccaagagactgtcacagatggagactcaagaaggagagtatgaaaataacacatccaactcagtttgaatggaagccagggataatgaatagcacaacttggataatttctcttgagcctgtctatattagagttattatatgccactcagtgactaatgtaactaaagtataacttctcagttgtaaaaaaaaaatgtatccttgtttatacatctccatcaattgcatgcaaaaacacttacatcataataaaatgatttctcttaacaataccttaaaccaaattaataaagaaagaataacctagaaaaaactgtaaaaaaggtaatgaggggttattatcagcatataagattagaaaaataagaaaaaaatgctatcattctaatctgaaatgtctgaaatataaaatcaaaacgatccctggcctggcaagatatctgaaacagttcaatactggcacttatatcttgggggtaaccaacagatgtctacttggacttaaggcctgctttataggagagaacacatgtctagtacagtaaatctatgagctactcttggctggagagatcataggtcctaaaagagaatgtagcactgccattttccaaaatcaatataacatgtaactcacccgaaatactcataaccacagatacctgaagctctcacctctcatagaagaagcttctttgtgcagtagacaacagctgctacagagatctaccaatggtcaaaatacagagaatatgtggccatggtgtataggtctccaatttacacatctataatataacctctatacctaagtctcagagaacattgcagaacagggagtattttaagggccagacagtagctctacacatgaaagggatgctgtccccaagatttctcaataatatggttgcctaaacaagaactgaatactaatcacatcactcaacatgacaatatgggtgagggaacttcactaggccctatatcaagatgaaggctacaggtagtaactgactggtgaatgagggagaatgcattttccctgggaatgatcctcatgacaggctatcaaatcccaagtggtcagttacttccctgtatatactgtatgtacatcacttgtatatatgaagaacaccaagtgaactcagtaggttgatgtgacaataatcataagagaagttaggaatttgacagggaaaataggaggaataatgtaaagagtattcacacagagaaccagtctctctcatgatgttcctctggctagtcaaatctcaagaggtaacataatagtgaagtgaatatagttttatgctcattgacttggtaagagtcaggatatataaaatgctgatcatttgtacctttactcttatgttgtattttatttcaatatctgcaataattcaccactccacacttagataattgcatgtgcaccagatactattgcagcgtctctttcactgctagacggcagagtcatgtgccaccctatgaaagtattctagttgtggctcacactctaattttacatgtgaaagatacggaatttccttttagactgatttctatagcagtttttaatatgttggcaaaaacaaaatacaagaaaaatgttactaaaataatatcaaaatgagacgttaacattcagtattataccataatggaggtatatattttagaatctaatttcaaattgttttaaagaacagtgggagtgggaaaaatcacaattccagaaactagtgattaagacacaaaaatgtatttttgttgctttttaaattttgttttattttgtttttccagacaggatttctctgtatgctatcacagaacttgctctatagaccaggctgggctcaaattcacagagatccacctgcctctgcctccaaatggctgggattaaagatgtgcaccaccacctcctggcttgttgcttattttttctttggttatatttacaaaccaatcacagtttcccctcccacccctctcctccctgcccccatccattcctcctccaatattttggaggcaggccttacatattaaatatcagccagccatggtatataaagttacagtgagacttacacttcaatttctcatgtgtaaatttttaaatgtgaagatgagtattataaccttgtattttaaaaatttcaattagtgttaaatcaatttgaaatatcattctacctacaagttcattgtcaaagatatataaattccttagcagctaaaactaagctctgtgtgtctaattacagatgcatttttgaaatacaccatttcaatgttatcttatataaaatgtaagatgattatttaatatctattgtttacctaattaagagacccaggtcaaagtcctttttaatgagttgactagttaactgaaggacatttcctgttccctaccttatatttctcaaatgttgtaggaaatgggccaatcttcatttgatcaccctattttatgatctataacttcttttttttggctgtagatgttgagactttgcagaatcagaatgttaaaatactattttaaaattctttatacagcataactcctgaatttctgttcattaacttcatgcaaaaatcattcccaataatgaaggactccaatagatcaagacgacttatatgaatgtattcatatttcatgctaattatnnnnnnnnnnnnnnnnnnnnnnnnnnnnnnnnnnnnnnnnnnnnnnnnnnnnnnnagatgtgtctctgtcctagattgctcattaaatgtgctatagttcatttgaacactgcatcactgtgactgaattagacatttcagaatccaaggcctatgattttcttcctctgtgaatttcttactaaggcttacaagcaaagctctggtagcagtgaaataatacatacagcagtcgatatgttctgtaactatataaacaaggttatcataaaggtagactggtatctgcaatgtctccattgtgcatgcaggtaatatacccagtatctgacaaggtttgagaagtagcaatccttattctttttaatggggacctctgagaccaacactgtctagaaaaatagcatgctcacagttatatagagacttttcctagattactgcatccaacacacacacacacacacacacacacacacacacacacacacacacacacacacacttacttctttaaaatttaagttgcagaaagaaagtttacaggagaataaaattgtaatgtatttctgcctgaaatataacggtatgaatctagtttttatatgtgacagaaggaggttatgttaaaatagcacaatggtgcagaggtctcaagtgtggattaatttttaaatcattacatggtgatagtttgatttctatatatttcctagtccagtgtaatgaaagaacattgctggaggatgaagttttgacttttcatgcagaatcagttctatatgatcgcacagtaagatattttgcagacgtgacgagtccacactgatttctactctcctatttttggaactgtaaggtaacaacaacaaaagcctatctctaccatatacaccgcttttaagtctaatctacatcatcatacttgtttactcagaataaatgtgagaatgaaaagagactgcaaaattacaacaattttcaatcactcctgacttcatgttaatttctatgtctaaagtataacaaagtgctatcagaaaatatctgtactttcttgtgtttccatttttagcatttataaaatatattttctatttgtttgaaatcctaaagcagtatcacaaataaatgcacacattaacaattaccaacctattttttaaaaaccaaattaatggtttcaaattctcataaagttgaaatgcctactaaattataagtaataaagaagtaatatgttcatttttttaattctcagaaaagnnnnnnnnnnnnnnnnnnnnnnnnnnnnnnnnnnnnnnnngattatggcaaaaatttaaaaaccaaatctaaagggttatcatcaaaagaaataaaattaaagcacttctgtgtgtctatgttcactggagaatttttttaattcaatacctatccatgggtttagaattgtgcagatatgaatttaattacatttattagtgaagagcttgaaagatactttgattcaccaacataagacaaaaatactacccattactttgaaggcaaaagcaaatatatctcattgagtttgaggctaacctactctttggagtaactttttcaaaacagaaaaaaataataaaagtttcaatttatttggaaggtttggtaaagcacagtctaaagactaacaatatattataaataagagacaactaacagatggcagagtgtgggactcagtgggaacagcacttgcctaccaagcatgtggacttcagttcacgctctattaaaaaaaatgtttggccggctaactgagaagctggcttcagtaatacacatggaacttataggtaaaagagttagtactcagtgacagaactgggtacttaatgaaggtagtagaagtcataacattgaaaaggactcaccttaacccgccctccatcatttagatgaaagaacaatagatacatcaaaaacaattccatgatcactatcaaaaaaacaaaaaacaaaaaaaaaacctatgggctattttgacatcattacttgtataatgcaattacttttctaataccttaagaagattaaagtaatatttatgcaaataagcaagcatatacataacattgccacaacattttacatattgtggggtttgaattaaaaagtgaagttagggacttatatgatttttcagatttaacttctttttccccttaaaaaacttagatgtaattgcatgtaaagtaaaaaagaaacataggtagattcagtgtttacatgtgaccctgatgttgaaagctctggcttccttgggcgtcacatgaatgttccccttgctgtagtccctttgttcagtcatgaatgaaatggctactgatgctctctaaataaaagcctcctattccctgagcagaagcaggtgctatcgaatagctactgtttgcacagtgactttctagacaaaaactttacacaaaaggaaaatacaaataattcctgggcagcctcctttgtaagtctctcagacaatagtccagctgcagtgataccacctgcgccattttttaaggtcagttttgtatcaacacctttttatacaggtactaccaaaatatttatgaggcacacattgtgaagtattcaacattcggggttgtaatttcattacttgctgaaagtcttagaataaggtatttattaccaataatcttgtttccaggttctggctattacaaataatgctaccatgaagatagttcaacagatgtccttgtatgaatgtacatcttttgggtatacgcctaagagtggaattgctggatcttgtggtaaactgattcccattttcctgaggaaccaccatactgatttccaaagtggctgtacaagttggcacttccaccagcagtggaggagtgttgccatttctccacatcctctctagaataaactgccattgaagtttttgattttagccattctgacaggagtaagatggtatctcagagttgttttgatttgcatttccctgatggctaaggaggttgaacactttcttatgtgtctttcagccattttacattcctcattcctctattgnnnnnnnnnnnnnnnnnnnnnnnnnnnnnnnnnnnnnnnnnnnnnnnnnnnnnnnnnnnnnnnnnnnnnnnnnnnnnnnnnnnnttaaattttggagaggagatcagccctctgtcagatgtggggttggtgaatatcttttcccattctgtgggctgccgttttgtcttgttgactatgtcctttgccttacagaagcttctcaggtcccatttgttaattgtcgatctcagtgtctgagctactggtattatgttcaggaagctgtctcctgtaccaattcattcaagggtacttcccagtttctgttctaattggttcagtctgcctggatatatgtggaggtctttgatccatttggacttaagttttgtgcattgtgacagatatggatctatctgcagtcttccacatgccagaatccggttatggcagaaccatttgttgaaattgttttcattattcgattgtagaattttagctttttttccaaaactcagatattcatagttttgtgggttcatatcagggtttttaattcgattccattggtctacctgtctatttttgtgccaattccaagttgttttcaggactatagctctataatagagcttgaagtctgggatggtgatgcctctggaagttcttttattgtacagggatgttttggctatcctgggccttttgtttctttctttcaaggtctgtgaagaattgtgctggtattttgatggggattgcattgaatctgtggattgcgtttggcaagactgccacttttactatgttgatcctacctatccaagatcatgggagatctttcaattttctaatgtattctttaatttctttctttaaaaactcaaagctcttgctatacaggtcttccacttatttggttagtgttatcccaagatattttatgttgtttgtggctattgtaaagggtgatgtttctctgatttctttctcagcccatttatcattagtatataaaagggctactgattttttttagttaatcttgtatcctgccactttgctgaaggtgataatcagctgtcagagttccctggtagggtttttttgggtcacttacgtaaactatcatatcatctgcaaacaatgaaagcttgacttcttcctttctgatttgtatacccttaatccttttgttgactgattgctccagatagaacttcaagtacaatattgaagagatatggagacagtggacaacccaaacatagtattactcactcatatatggattttacacatagaggaaaggaatatcagcctacagttcacactgccagagatctaggaaacaaggagaaccctaagagagacatacatggtctcccagagaaggggaaagggacaagatctcctgagcaaattgggagcatgcggggagcagagagggagctaggagaaagagatggggagaagaggaggggtgaggaggacatgatggagcaggaaggttgagtcagaggaagaataggaaaacaagaaaagggataccatattggagggagccataggtttaaagagaaatcaggcactaggaaaatgtccagatatctacaaggatgacaccaactaacaatctaagcaatagtagagaggcaacttaaatgctctcccctgatagagactgatgaataacttatattccatcctagagccttcatccagcagctgatggaagtagaaccagacacccaaagctaaacactgaactgaactggaatcctgtttcagagagggaagagttatgagcaaagtggtcaagaccacagatacagctgccctgaacaaatgtgatttcatggaccccagactgatacctgggaaaccagcctaggactgatccagaccccatgattgtgggtgtcagtgaggagccctcagaaatctatggggcctcttgtacttgatctaatgataagtactgatcaatatttatccctagcacaggaatggactttgggagcccattctatatagagggatactctctcagcctagacagagcagggaggacctaggccatatcacaaaggatatgacagaatctgaagatactccatggaaggactaaccctccctagggagcagaaagggtatgggataagtagggtgttattcggggggcagagaaggagagggagagagaactgggattgacatataaaacaatgttgtttctaatgtaaatgtaaacatggaaaaaagtcatacatcacaaagaatttaacatagatgctacattctaaacaatagggaggaaaatgaatgacatcatttgtcttttatcatgctttgtatataatacagcaccacttgtgtcatgttttggaagcattatcaacagtataatttattttcagcaaactctattgcagaaggagaccataggtattctaagtgttgattaagcaatatttgaaaaaaaattttatacctgtgaggaaaacaaggcattctgcctataaaccagtaacaagataatcaggataaatctattaatctgggtaaaaaattcctcagttcttagaggacaagaagaaagtaaaacaaaagttcctcccataacaaatacactgaaagatcaagagggccacctgcagtttgacagtcaaagacatgaaaatttctcaaataatcttaaaaatattgtttctgaggatgaaagaaatcccaagagccttaagttacacttgattagaaaagcatataactacttaattcagattaattaaaaatttgatatatcttagtttgacatctatgatgttttcatcatgtttaatttttaccattatacaggaatgcgtttaacaattaaatcatgttttgagtagttggttcctctttatctttgaaggtaataggaacaagtcctataacatatactgcacttgattatgaattaggcagtcatattagtctacacaaaacagctttcatctttttaagtcactatcaaaatacaaagttaacattagacaagatcacataagaggactaatacacataagaattcacagagactatgacaacaaacttaagatcggcacaggttaacatatgactgcagaactgaaaaggagaagtgtacacaaagtcccaccactaaccaagagtttgtatgagattgatggcagataaggaagggaatatggatcagtcaatcatactccagggaaggacccctgtcccatgccccagagttgttatccaacacaaaatggactcttttgtccatatttgcaattgtgaactttttgttttgtttccttctattggttttgtttatttggggaagggtttgtttgtttgtttgtttgttttgggagaaataacatgaaattgggtgggcagggaagtgcaaaggatcttggaggagggtgcatggggaaagaatgtgatcaaaacacattatctgaaaagttgaacacagttttaaatgcgttatttgcttttgtttaagtctcattttcacattcggatgagaatgattttcaaaaacatctcagtccaactcagccctaggaagaatattaatgtcttcatgaaccacatgagatccacacttagataacagtggctcagatactctctaaggattttaagtactatcacagtatatcatttaccaggattctggagtgttatcacaggcaatgatactcgaatttagtatcattggatactagataaaagacaagtaaggctatcaatattcttgcgggaatgacacagtatttccaattttcagcttctacaatggagaggaatctctttcatctaacattcaggagaaggtggcagaaacattttagtaatatgctataccacttacaaaattacatgattatgaatctgtataaatggaatattggattttattcattcattttcataccctgggagcaagagagagagagaactgcaaataaatgggataattcctaaataatttctgaataggttttagtttatatatattataaattactatccaagctacaatgttattctttatcaaatgtgcttatgtgttaatgattatttatcatttctccaatcatttttaggttttgttaatattttggatttcactattacttaccatttgttgatttcatttttgaactacaacacagtttatagtatatccttgaatttgagagtcctgtgaaatatagattctatatgtttatcactcaagatttttaacattcatttacacaatggtaaattttaagactttatatgcacaagacccagagttcttatcagatatacaaaaaggatactgcacatcaaggtttcacctaagataaagagacttttgcttctccaagtgtcaaagtcatttaaagaaccaagagtcaagctagaccctacatgctccaatagtttttgcatatgtatatgtaacatttggcagtgaatgataacgagaactattgtaaaactgacttcccatcacaaacacacatccaaaagttaattactacttattataagggagttccacaagacacagtcacaggcacacatgcatacaatcaaagagctttacataaatccaaacagttcaatcaagggtttctttacactatgtttcaagttcattctcactacaaaggctttcaagtaatcacattacccagtctttgttaaaatgcattgatagtcaagcccgtgttaactagattttctgaacacagaagtgaataggtcaaccataatactgcacaggcaagagcttgaattttctttgtcttttaagatttttttaaatccagtgaatgttgcaattgagtaaaggaagacttaaaatactggagtcttggttgacattagcaatttgatatattcctccaaggttctatttcacatattgaggtgacaattttctttcctgatttttataaactttactaaaagctttcatttttttggaaggctttttttatgttgtcactaaaagctatatcatcaatacttgcaatagaattaaaatggactaaacatcaaatactttattgcaaaaaataaaattattcagatagttattccaaagagatgtgacataagtacccttatatgataagtatgcatatggaaacattatttttaaagctgtaattggatttacttcaggcttagaaacatagggggtacactggtaaacaaacagttgaacatacataggaaatgagtgtcagaattctagaatttttttttggttggaataatgccaatctgaaaatattaggtaaaaacatggaaatagtggataaaagaaatctgggaagtgaaggaagaatgaacaggtactttatggtgaagtggtatatatgatgttatatacatgccattatatgtttgtccaaacatagaggactatgtaggagaaataataaaccacaatcttaataatagagaaaagtagaagcacaaacaaaaaagcagggaatgctttccatttatttttttcctgaaccttaaacaaccataaaatagtctgctaaccaaaacaataacatgtcaatcatttatgagtagataattaagtgtatggtaatgagagcatgatttctacaaaaattagtatacacaaaacatgatacaaagctcttcccctataatgagattgatgactaccttaattgccatcctagagccttcatccagtagctaatttaagtagaagcaggcacccacagctaagcactgagccatacaccgtaaatccagttgaagagagatgagcaaaggagccaagactatactggagaaacccacagaaatagttgacctgatctagtgagagtacagagaccccagtcataaaactggggaaccagcattgaacggaactaagcactctgaatgtgggtgccagctaggaagcctaggcagtctatggggcctctaacagtggagccagtgtttattcctagggcacaaatggactttgggagcccattccctatggagggatactattgcagcccacatacgtgaaagagggcctaggccctcccccaaatgatgtgaaagactttgaagatcccctgtggaaggcctcacttgggaaatgggtgggggatgggttggggggttggtggggacatgagagggcgagggaatggggggattgatatgtaaaataagacagtgtctaaaataaaaataaataaaaatgataaaagaacatggtacaaaactaaaatctgcccccctctggcacactttcctacagtactgttatgtggcattgttatagcagacttaggggtatgctgattgaacatttcagcctttcaaatgtagaacttaacaaactacttttctttactgtgaatttagcctcacttattttgttaaagtaagagcaaatggacgaatgtacttactttgctgtggctgacaatatatttaaaaaatatcttaaattctgtgtgtgtgtgtgtgtgtgtgtgtgtgtgtgtgtgtgtgtgtgtctgtgtctgtgtgtatgtaataaatgtgtgtgtataacacatttattcttaacttacaagatgctttgaatttcctgatctctatacaaataagaaattagagaattattaaaataacaagtaagttgtattgtattaatatttaaagattcatttatttatatgaaagatttgtctgtatgtcagtagagaacacaagatcacattatagataggtgttagacaccaatggttgttgggaattgaactcaggacctatggaagaatagtcagtgctcttaaccactaagccacttttccagctcctgggttgaactttattttaaatgactaatcaacaagtgaaaatacataggcatgaaatattgatgacaagagactttcactttttcacaatctgatttgatgtttaaacacatcttttgctaactaacaacttgcaacaggttttgcaagcacaacaatttcctttctcaacttggcaactaagactcttatatttatatgcttctctcaagtcctggctagacaccataccaaatcttggcagaaaatctgaagtacaagtaatctatggcaggtcacctccattcacatagctttttctcctattaagtttatctgggcttcacacacataaaatgtaacaaaatgaataaataaaataagaataaataaaaagccactaatcaaggaaagaggatctgtgaattatttttctttcttttgttttgtaagtcacaacactgtagccttctatttatgtaatgtgaccatcactgaaatatgttgaaaaaagtgctattgaaactccctacgaggaattacaggcacctattgctcccaaaaagttgcaccataagtgcaatggctagttttaaaaaccatacgttacataaaatgagtttccatgaatttaattaacaacaatatgctttaatttatctgtatcatctccagaaaagtactaaaagaaagggagtaacagctacccccagatatacttcataaacaaaagtaaactaagaaaagtgacatattatcctgagattcacctctgaattaacaaccccataaaaacatttgaactaaatgtgaattcatataaatgcatgcgtgttgatttatataaattttactgtatgtatgtccattgactttaataagactatttatgatctttgaaaatgaacattctttcctttacatcattaaaaaggaaggttaaaacctctaaactactgatatacagtgcataatatttatagatgaaaattaacacaggaatggcagtctcttccttaaaggtccacattaaaaagatttggcaattatcaagggtcatttgagaaacacacttcagagttaaggtttattgctaattatgtttgataaatattaaaataaatacatttcaagtcaagtaccctgaaattcatttctgacagttccaaggaaagtggtgtccaatgtcaaagccagctttacaacagggttttcttgacagatctcagaaacttcatgctataccaaggattaaaaatcctgacattcaaccttaaccagaagagcgaaccactaagtttcttctaccataactgatatattttgtctgctatcaagacaactctaatgagcaacagcatgagctgaggcaactcctgacaaactagatagacatgatgattgaaatcaggaagaactcttccagattaatacaaggaaacagtgacattagttaaatataatacagctaaggatggggtggctccttttatacaatttcctttgagaagacatggaagcaacttggcctagttactccattgtgcaaaatagtaccacgatcttgaaaagagcaacaaagacagaacattaatggctagttgttcacaaaacaatagtttataatacatacaatctcgaattataaagtatgatgaagactccaaattgtccttgatattacttatagtagcacatgatatatgctaaaataagaggcaagggggaatattccagaataagaggccaagaataatactgatttttatatttccagatgttttcactttctggtaaattacataactcattggcaacatgagatgttctctgagtcaaaagagaataacttaacctctagaaaagctccacactattttttctaataaattagccaccagtgagtttgtgatttatgaaaagaaagattaaatgttgatttcacacatgcagaactacaccaactatagatccagatggaaacagaaaaaaaaatgtcttcactaatgttttgggagctaatggtgttcttcaaacacacccttttcacaggattccaatctgaggataatatatcagtatattaatatacagttaattataggtcctgatataattatttaaattatatatcacaaaccactaagtggcttttaaagacattcacagcaacaaaactacttaagtataggtttatcagaagtaaagatactattcaagaattgataaatttttactttttactttgaatatatatcctaattttcattatatcactctctgaaaactggccaaggaagcatcttgtacaaagagaggttgtgagaaagtggttgctttaactaaagaaacaaccttattgagaaaaactgcttaaatgaatatgcaaatgaatacaaggggggaaagcacaataaaacatcagataggaaaaaggataaggatattggatagtttttacaataagaatctaaaaaggattttcctaagcctggttagttaaagaaggaaaacagggaaaaacgataaggagaaccacaaaattcagccacttttactgcacatcagtgaaaatcaaaaataagatgttagaaaatgaaccacaggtagatttatgaaggataatacacatatgtgattagaaagtaacatttttaataatctgccatttccaaaataatgctggctaaacttcaagattggcttacctttacctatgaaatatttatatatttatatatttggttatttttgtgtagctttatattatttatatgatttctaaatatgtaaatgtgctgccaaattctccttgagttttaaaaatgtgatcacaatcatatccttaacgaagtgaataaaatatccccattttaaatgacaataaatgactttcaggataaatttctaaagcactcaaacctgaaataaaagtcattcaaaaattggatatatttctaattcatactcttactttaaacttatatactaatatgcaagaataacaataaaatgatatccaatattcatataacacagtgggccacaccactattctcaaattttcctatctttgcctctcatgaaaatgataatttaatttgtgggcattgatgaacttatcccagaattaatattatgattattctactatttgacaaatgaaggaattcagatatttagaggttatgccatttgccaaagggcactggactaggaagtgtccgtgtgattacaaaaccagcagtttgacttcagagtttattaccattatatctgacactggaacttaaggatctctttgctgctgtggaaaaagctgatggtctattgcaaggagtttttaactgacaaatgtctgtccaaacttagttttcagcgagtagaagctaagaattgatctgcttcatgtcgtcgtaaaggtggaagctcagaatttatgaagggattaggaaaaatgattaaaacatgatgtttcatgaaataggctagagaaaatgaatgaacagaaaaaaagcaaggcaaaatacacagcaaaagtaatatcagaaatcggaaaaaatacacatatttgctggaacatataaattaataacaatagtaataatagcaatgataaataaatcaatctaaggaccaaatccaagaaaagattgctgcattataactacatcaacttggttctcagacagactcctttaaagaacatgagaaatttgtctataaattttctttgtttttgtttgcttgtttcattcattcattctttctttctttctcaactattacttaagcttacatactgatcctaactacctctttttcattcctctgccatttgttttaactgaggagttaggtcctgggatcttagaaactgttaatagcagtggaataccaggcaaagacaaggattggtaggtactgattatagagcaaaagaatctacatgatgttctcatgaaaacacacaagagtccaagtgcccttttataatgccactttttatttctatttcttttccatgcttatttcctggcatcgtggtatgcctaattacagaggagtcacaggtaatgaattacagaagtggaaagacaagctttctgtgatgggcagtaaggactcagtgctgttaaaattgcttgcctgctgatgctgagaagttataggcatcaaagctaattcagtaactaagagacaaaggtgttacagcctctaatttctttaatgctctagcactagagccccaactactgaggcacactgacaagcacaggaagtgacagatgacagcgagggagatgacaaaatacctaccaaaggcaaacattacaactattaagtgacagcagactgggaccatgagcctctgctggtattctctctgcatctctctccaactgaaaactgacaagcaagaacacagtagctgtccacccccttttctccatgcctattttctgctcaatgaacacatgaaggaaggagagaggtgggcagagttatttctccagtctccttggttttatctgtatttagtcaacggctgcctctttttcctgaaaaggtgtccagataacagtccgaggcaatgctcaactttgagcaactttcttaacaaatttctgagggtatcctgcagagacatcatcctatactttcaatttacttttctgcagtgaatttttcactcatcccccaatgtttaagcttactactctgttgtatgtcataaacaccaaagattatgcataagtaatacacactcatccccataaaactgagggtctcattcatacacacacacacattttatttgcatgcacacatcattgtgtatgtaaaggcacatgggggagtgctcacaaagacatgtggacctccatagctcctggcaatgaaattacaggtagttgtgagcaactctgcgtgtaagatgggaccctaaccccattcctctgcaaaagtcacacatcctttaaccactgacacctgttgcgagccagccttgcccttttgtatctgggagaaacaaacagaaatgtatggttttacatccaataaccacaatcaaaaaacacagtcttgactaaaattccaaattcattcaaacaaaggctttgtcatcatttgaagagaataattcaccacacctgcccatgccttcctcatacccccaggcctactcagtgcattctgcaaataatgaggattttctcatttactattaataatagccttgtaagacacttattgttaactttgatttagtgtctgtcccaagccgcaaaacagttaaatcgctctctgaaagttacacagaaaatgtacaaaacagcatttcaatccatttattcattcctgtgattttctcacttatggaactactctcaaaagattctaaatatcaccaaattagcacatatcattttcctgtacaactatttatgaaaattgccataagtcctagattaaggatgccgcaggtggaaagtttggtttgtttttttttttttatactacttatattttcacttccattagagtatacaaaaatggcttactgcatggactttacctgtggacaaagcatccagaatcaaactgagcaggctcaatgcccagttctgtcatttctgtgagatcttaggggagtcacttaaccatctggagcttcaactattgaaatgttttccctaattaccgttcaaaattattacatacttcaaagagatatgaagattgaaagacagattatatataacatagtacagtaaaatctttccataaatgttgactattgtttttcttaagtttgatcctgtactccttaagaactatgtgtttcagcaccataattacatgaggacattttctctaaaataccttgtgagataagaaaccatgtctggtatttttacatttcaatttggcaaaagtctcttcatttttcagaaccaaaaattcctcccaaaatgacacctcttcatctgtgtaacacaaaatgaacattgcctaggtagttctcaaacctagggaactatacggattctgacattacaacatattcttcatctctacacttgttcattagactatgaacccttcaacgtgaggagtcacattttaagcagccaaaataaaactgaaaacacagtagattctcaagaagtaggaataaataaaacaagaaaagcctaagcaacacatcatgtacttgctaaagaaaattttggagaactataattcgatagtttcagggattactgaagaagtcttgtgagtactctaattgatataaaggtatacattctaagatgagacttcttatcatcaactatttaatttgaagggacagcaaacaaaaaagtacagaaaagtttacaggaactgaattggttctaagacaacaatcgttttttttttttcaaatcaaataaaattctactaaaaatagacaggaaatatgagtgtgaaatgaattttaaggacttacatgtggcaaagaacacagtttgtttacattttctaagcagaaatgtcatagcagttaaagggtaatatatataaattgttgctttcactgaggtatagtatgaatatatcttcagcacgcaaatacatttagtgactagtaataatacagttaagtcacaggaagcagaagtttaggatgccctttaaggaaaaaaagtatttgtttcctttgccaaaagctatcattaaactacgaatacagcatccctcatttaatctaataatactaagtctatgttagtgaacaatgacatttgtaatgaaaacatcaattgcacatatgatagctggatgtctactttgtacatctgagaactaaattcatcattttacctttaatatttatgctacacacggaaacatttcaaaatatattaaaagtacgacataataaaaaatgatcacagtatttagataaaatgggaaaatctaacaaagttcatgagtcattgaagaactttaacaaaatggagatgactatgtttggtatgaatgcagccctacatacagaaaacaaataacctctcaagatctactgaaatcagaggaacctcaaaaaaaaaaaggctcacaaaattaaaccagctggatttacaatccatatttaccagtaaccagtaatcttatgattcctagacatcatacaaagcttaataagattagatccatataattaaaagttcaagattttagagtcataaaatagaaatgagaaaacaaattacaaataatagttatcatattctaacatttctttgttatctttgtttcattgtgggcctatataggagtatgactataggtcaatgtatgtatacataagttcaacttgagtataaaaaaacactgagataaacacaaatgccaatgtaccaatacttctggaatatccaatttcatatcatccaaatgcatggcaaatataacacacacatacattcactgtgaatgattcaagtatagcaacttaaactaagtatctattaaataagaattctggtggtgacctaaattttcacacaacacatactcaaattaaggcaatatttaatgaactcgcggtttttactaagaaaaataatgaggaaaatttggccttatcattacacaatttcttaacaaatgtgacagcattgtcaatgagaattcaactacctagttagtttctgtcaacattttactgacaaaaatgccctaatagaatccttgaccttcaataaagagtttaaatgcatcaaatacaaatcattaagtatttttcaaaggcatacaataacaattctgacattttacaaggtcattttagaagtataaatgaataaaggtttcattgtgtaaaatcactaacataacttttattaaattgtataaaattaaaattaataaggtcaatcatagcaatgttttcttttgctagtattaaaaactatttaaaaaataatttgaatcaaattatggatattttatcattcccagccattatatttcactgtgaatgaagcagtatgagcatgaaacttctacatggtgattagcttccaaaggaaaaactatgaatttcagcaatttttaagcatcttcctgcatttgatgtctaggtggagagcagttaacaagtaagcataaaatgtaatatagcactttacagatgcctaaggtaaaaacatgatgaaaaatacctaataatttatctttaaatctttattttttaagattaattatttaaagagaactacctgttttgattggaagtgtatttcttcagttcttgtatacttgtgcatgcatgtgttcagagacaggtttttaaaaatactagtcaagcatcacaccctaatcccttgataagttttgcatttgatgtggatgtctgatttcacacttgctaatcaggatatgacaccaagaaactgtaccatttaggtgttaactaccttaaactatattagactactttcaaatatttagtatttacagagaacaagaacacatattaatcatttaccaatagtctattttgcaaatattgatgcatgaatactgcatttaattattatacattaataacacttgccatttttccatgattgtttggaactgttttatttcaattaaatatctaagagaacatctattgaggactgggttgtgagaaataatgtagcaaaggaaaacaacaacaaaaatataaatccttctgtctggccgagtttattattttagtttctatgcaatgtgcttttgtagctgaacatatccagctatgtatcatcctcaatggaatccatggttcattcttccattagcccccaaaattttatatttcctttctattatctcaatgagtagtatcatcttcagtggtcctaaagtcaataaattttgataaggctttcattcattctaactgaacatgaagtagttaaaaccacatatattttccactctgaaaaatctaagattttcttctgccttcttctgattttactgtctcagaaatagccagtctgtttaaaccactttatatcttcttgaaatatttcactctttgctgtcttttcagactatattttcttcatccaactacttccttgttggcatttagtttattgtgtgatccttttctacactttcacaaaatttggtatgtgaggaattttccaggggccagcactgttgtgtttttattttttgtttggtttggatttttattattcatttctattctatgtctttaggtaagttttacatttttcatacaagatctaactatgtagtccagcttggcctccatatgtagcctaagctacacacaaactttcaaatttcttgcctcaacagttaagtattttaggattacaggcctgtaccactatagctagcttcatttccatggtggttaatgtcacacatgtgtagactagccctaaatcctacacagtctctctctagctgaaacccaaacattcttctgaaaccaatttacaatatataaattaccaacagcatgtggtcttctaactttctttcttcagaaatttattatatcagaagataaatttggtgttctcttccttcccatcatcaatcttgttacagaagcaagaaatgcggggatcagattttacttcaacatcttctctgccaccttccatcgtttaccaagtcactaataccagttaatttctctctgaatatttatcttcttccttagcaatgctattggcactatcttagtttgaatcctcaaaatctgtaaattaagactattatttgaaagcctcctagaagtactgctaacgatctttaacattcttatcctaaatgttcatcagtaaaacacagtttgatcacaccactgaaaatctctgattaaaatctagtgaagattaccagaaatgttcccaacttacaaactgagtcagcaaccacatatcctttgtaacacatcctccaaccatatttttaattaaatgatgattgaaaagttcacatatgtacacacacacacacacacacacacacacacacacacacaccacacacttcctcatctctctattactactatccatgtctattgctgctcttctagaccagtctgtttctcacattcaagtcaattcattttgttttgtgatcaacaaaatttaatctgtgagaccatagattttggaagtattcactagagcctggtgggcttagtggagacaatgactccccatcttcaggatgcatcaccagccaaagtttcagcagtaagatacaggttcacattagcccatctctaatcactgagtgattgctcaaccaaacaatgatcaatagattttcatgaatactaagaaaattagtttttcctgtctctctatagtaattatgacagtgtaataaagcagttacttgctatcaataccccctcctattctctgagctcgaatctattttgataacacaattcttacaaatatacaaaaatgcaaaatgtagattgctaatgacaccataatttaagtcattagaccaaaaacactcattgtaccttaaataaaaggaacacaaaaccctactattcagagaagtggccaaagtcattttgaaatatgactgtggtctaaaagagaaggaaacagagatgtttgatacagcatgattaatgttctaacttactatataatacttgtttatgttgagaaaatttgattatagatttttttctcacatatttcctattagaagcaagtgccaaatattcaaggggaatatggcaaatagcatggcttatattcaaaagaaaaaaggtaaactcttctattatgtggtattattatgctggtattatgactgtcctttatctttatgaccttctgacagttcttattcaggtttaatgccaaccaaccagtgaaaatactattaccaataattttcctagtttcaaaggtctgaatatatacacaaagcctaatactcttcatataagaacttcaggacagaaaaacagtctagcagtaagcatagcaagtatattcacctatgcctgtgaagcacatatctatcaattttaaattactattacaaatttcagtgatcatggaaattaagcttagatacatttcaatgtgcttgatcacagtaaatccacccacctaaaaggagatactgagtaaaacaagtattattccccatatattattatacaccagaacatttgtttcttcattactacattccagctatgttgggagcataccttctttctaaataagtgttgccaaatttgaagcaatatcagtaactgcactggtggcttctaccacatcactaccatagggacagagaatacagtgtgttggctgcatatggattcacatatgtacaataaaaatggtgatttttataatgcactaacctaacttatataagcactacttgattaaaaagacttctgatagctactgatatgaagttactttatccaaacttgatagctaataaaaaagtgatgatttgttggagagcctaatgaatagtaaaagagaagataatggttatacaattatgcaaattcataaactgttacacagtttttaaaagttcaagaaatagtatgcctaggtctcaatcttcattatcctgttattatatgtgttattttgaccaagataattcatgtctctatgtatttttcttcatgtataaaaggaacaaataattgtaatcacaaagaattataaagaaaaaacttatttaatgcacttaagagaataataacattgtttgacactgagcatcaaaggctatatcatagtaagctattataattgtcatctattttcaatcttctatttgtgagtacattcaatctagttttcctttttaaatgtaaaaacctaaaataatatcaggaggtgtgaaaaatacaattaaatatgttacatgaggaaatacagagttactctgaaaggaaatgccaagatattgagattccactgatactggcaagataatgaagatgaatatcattctgcagggtaacatcagcattattcacaacagagagacaaaaataataatttttacaaagttagtttccagccagtaagggaaagataaaatgaaggaagcaaaaggaccagcatatggtagtcagaggacactgtagtctctgtggatgtagatctgaaggttgagagcttagcaagtagactcactgttatcaacgtttagtatctcctcagtagggaaaacttggataaagaacaagaagagaacacctaactcctagttactatgttctaggaaggaggccaaaatagtaagatggttttaaacaacaaatggaatgtactttttcagttgtgtacctctatgtgcccactacaataggcttgactttctacctttcataaattcaaaccacaaggtaagaattatttgagtaggccaggatcccatacattctagagcaaagcttgataagctttatttcctggtaaccacattttgtctgagaaatttttaaatgatgaagggagtacaggataaaaaatccagttatacaaaccaaacatttactaatgatgactcataaaaatatttactggcatatacccaaaagatacacattcatacaaaaaggacatctgtttaaccatgtccatagcatcattatttgtaatagccagaacctggtggcttctagatgcccctcaactgaagaattgatggagaaaatttggtacatttacacaatggagtactgcttggcagaaaacaacaacaaacaacaacataatcttgaaattcgcaggcaaatgggtagaactagaagaaacctgagtaaggtaacccagtcacaaaaagacaaacatggtatgtactcactcattcatatatggattttagacacagggcaaaggattatcagcctacaattcacactaccagagaagctgggaaacaaggaccctaagagagacatatatggttccctgggagaacaggaaaggaacaagatctcctgatctaattgggagcatgggggaacggagagggaattaggagaaagagaaagaggaagagaaagggaaaggaggacatgagaaagcaggaagatcgagtcagggaaagaacagaggagagcaagaaaagagataccataatagagggagccattataggtttaaaaagaaatctggcactagggaaatgtccagagatctacaaggttgaccctaactaacaatctaagcaatagccaagaggctaacttaaatgcccttctccgataatgagattgatgagtatccttctatgccatgctagagccttcatccagtagctgatggaagcagaggcagacacccacatctaaacactgaactgaactctggaacccagctgcagaatgggaggagggatgagcaaaggggtcaagagcaggctggagaaacccacagaaacagctgtgctgaacaagggggaactcatggcctccacaaaccagcataggactgagatagaccccctgaaaaaggatgtcagtttggaggtataatattctatgaggcctctggtaatggatcagtatttatccctagtacatgaatggacttaaggagcctactccacatagagggatactctctcagcctagacacatgggggtgggtgtaggccctgctccaaattacatgacagactttaaagataccccatggaaggcctcaccctccctggggagcagaaaggggatgggctaggagtcagtggggagcaggggaagaggagagggagagggaactgagattgacatgtaaaacaagcttatttctaatttaaatttaagaaaaggaaaaaaaaaaactacacagagaaagcctgtctcgcaaaaccaaaagaaaaaaaaaggaatattgtatttttattttgagccatatggtataaaaatctcaaagaaattatccatgtttcttctgtatttttttttaatcaaaggggttttcatcagaataatttcagtaccacacagtcacataaagaatgtaaaactcttggatcacagatttagttggaataagaataaaattatcacaccagagaaaaaaatgttcaatttttaattaattcattcatagtatacaatatgacctcatcctggagtaaatcaaaagaaacatgcagaggtgtaatattcttttgaccaaatagataaacaccagggaaaaaagagtaaaaggttggctttacactcaaatcaaaagtagtacaaaccccaagagttaagcaaacgttaatgctaaagcaatataatttatcactatacagcaacactgaactaattcaaacagtatacttcttaactaggaaaatcttagcagagtatacaaatgatggcctgtctttgttatcacactattttaatcttctaaccactttcacacctatcctaccttcttcacacattcctaacttgatagttagaatgatgtatttatttcataacattacctttggctcaaatcacatatttatgagaaatttgatctcttgggatttttgtccagcatctaattgttcaatgattcccttggcatacattcttgatgataaagtttcaaattccctattatttttaattactttccattatcattacacttaaccccatcctaaataatttcccatcatatgcttcctcatttagaacaatgaatactactaggatttcagaggaactgaattatgtttattcttgtttcttttctgtcagcctctaagttctaaacaagcaaagatcatacctaaaccttaatcacaactatatcctctaagtccaaccctaaaatttatagaagagtaaattctcaatatatagatttgcaaatttaagaatgcaaagaaaaatgaaggtcttgattattactaaaggacccataatttctgaaaataaaaatacatttaatagaaaatataaataatggcattaagcagttattaattttataaaatgaatgcctactgaggtagtaagtatcacccacatatgaccccagtagtctttaatattagtttacttttgcttaattgttcactccattttcatctctacttccatatctaaacttcaagttacagttcaaatggttagttttttgaatatatgcagttttaaatgcaataataggatgaagattaaaaaagatcctggaataaaaatgagaatagtatttctcataactaagcaatgcctttggaaaatatcctccaaagtaataccccgtggttgacttatcatacaacaatttaagcatgggtaaacaacatgtgtaaaatctagtgatttggtctctagaaaattccttaagggatttggaaacgatgattgtctctgatcaaaattattaagcaggatctaaaggatagataaacatggatactagcaggacatgacaagttaaaaaactctgtctctgttttttgagaatataattatttcttctgtgtatctcaatcctaaaggagtaccaattatactagaaaaatagtataatatgataaaatttgacatataatgttgaatgagcaaagaagacaaagagaatagcatcagtggtagcttagaagacttgttagaataatgttatctcattgctactgtaaattagactttatgtagattatcattggtttttagaaactgtacacaaaaataaagttccccaaatcctaccatccactaaaccaagattcatgaaatagtaagtttttactactttgattatgcagatgtccctatctcatgaaagataaacacagagatgttaatatctggtgaaaattattgaaaggccactttgaatttaggcatatgatattaactgcaagatttacaaatgtacttaatcttagagcaaaagttagtttcttaaaatcttcaatcactacttactattggaatttaatgttgtatatatcttataaaatgtactgtctataaccagcaaacctggttgtgtagttaaaatactatttattcaataaagtactatatttctgttttagttagaggaagagggaattgggatttctatgcaaaataagattgtttttaatataaataagaatttactgaaaaatagtcaaaatctttttatgttatcacattattgtctatcttgcctaacaggaacgaatactatacatgctggcatcacaaatgtcagcacttaaagaaataggttgagttaataccacagatttcaggcacagttggtctatgatattggtatttctcttgtatgtatgaaatgaaatggggaaatttataaattatcttccaaagatcctaattatgatttcaataatataaataaattcatatataaaataaacagccatttaaaaaattccaatgtcctaataactctacgtggcaaattctttagttctaatatgtatctcatcactggcaatagtcaggataaaatatattcaactcataaataacttcaaacatgctaaaatgttatgaggtgaatctttaggtacatgcaaatgtacattattaatagaactttgtttcaaagtccattcttatatccttattgtcaatgtttcaaacttaaaataatacttcaagtaaatcctgtaattggacccaaacattacatatgaaagtttaggaaattggagaatctagtctatgtacataaattcagtgaaaaaatactgatgatcttaaatagaagaatcatataattgatcattggcttttaatataggaaatgaaaacaaaacttcatgttaataactaattcagcaatgcggtataaaattcagctttccaaaacatttaaatatattatactttttcatgacatttaattggtttgacatagtataagaaaggatttggacaaggtgacatactgattgcttgtgttcaaaattgcatgtgggcatgcctgctattgacaaccatcacttcatgctagttgtgaatgaccttagaactcgaaaccccacacatcaaaaaactgggatgaatccattaatatttacattataagtatgatgacacattttagatagtaagactgtagtatttctaacagtcctgtgagctggaagcccacagtaaagtttaaaaacattactagcagaatctaatctcatatagctctgccttttaggaaacaatgaatgggagagagtaataatctccattcacaacaagagaaaagagtaatactggttcagcatgttcagcctgtgacataactataaagtacacttggaaaaaatctttacttttcacataaaggagtcttggaatatttccaataaagtcatttcaataaaggcctttttggtaagtatattcaattggaggggttaagacaacaacaacccgtgttaaaggttttccaccttcttccaaaattgaaatgccagcttcaatctctgaggcaacaagatgtgtatatacattccacgaatgaataatactgttcagactgaaaactaactcagagatcatctggatataccttcttagagctgagcacaaatccatggctattcctttcccttcccacaacaatcctggctaccaaataaactgtacaattgaaaatacttgtctcaggtaaactgtctaggactttggtgtctgcaatatatgtttcatatccataaaaaggaacctatattaacaattataagttttgggacaccaagtgaatatacggaatcccagcaatctggcaattaaagccaacaagttcaaatccagttcggctgcttgctagtgagtcaattaatctccctgtgacataagataataaaattatttttaagataccttttttatgaggattaattaagtgaatacaagcaacatatccagaaaaatatgagataaaaaataccctatgaatcaattcagccccgactgtgctatacattctgtcttaagataaaagatgcgttttacttcatatacacatttcttgatgataaatgcatagagtgtacggaatatacacttctctattgacaggcaacacactgcttagagactaaagtgaatgtattagagtttcatgaagtaatttaaacatatttattatagttctagtggtatcaatctggtggtgctgtaactgaacaaacaatataactcatgaatcaagttacaaataacaatgagttgggattaagacaatctacaaagatatggtcaggcaacttaaaaataacatccaaaatagagcccatccatagtaactccttttgacatgaagcaattcaggagcaaatataagacttcatatagtaagtgatgtggaaggaaatattatctgaaaatggacctatgttgcaattttatcttttttcccactgctagaaaattttaaattatttttgggagtccattccccatagagagatactctctcagcctagatatgcaggggagggcctaggccctgccctatatgatatgacagactttgatgatcccctatggaaggcctattcctccttggggagtgaatgaagggggtaggatggggtggtaggtggggggcatggaaagataggaaggagagggattgatatgtaaaaacagattgtttgtaaattaaaatgtttaaaaggaaaaggaaaaaagaaaagaatgtctttggccagtctcagagattataaataggtatatgctaaatataccaaaataagtggaattaaacaattgacttccccttcatatccaaagtgatataaactcagtccactttattaaaagagagcaactacctacaatataaaaatactaaattaagaaaggaaaccgatttgagctacttataaaattcacatggatcaggaaaatctttagattactgcttattaaggaggcccaagtctaattaatgaaattaacttacatatacttattcccaaataaatcacatacaatatataaacattggcagagaattataatctactccctaggaaaactgataacagtattgtaatagattgttgaatctgaaagtgaataataaatataaatatttcatatatattacataaatatactgttatacttttttgaaaacttgatataaaaatcagtttaaaatacatgttatggggttggggaaataactcaagtgatagagtgtctgcctagggaataggaacacctggtctcgaaccatagcttctcatgaactaggtttggtagagcctgtctataatctctgtcctcaggcctattacagtaaactggaaaaaggacaatcaaatatttaaagtcaaccttggctacacattaagtactaggccaacctgggattaagagcactatagcagtaaagagttttcagaaagtgctattataaaaagccaacgttatccagttgttatctactgtaacactggctgctcaaaataattaacagctttctttatcttttccatctatatgttatctattgtttaaattggtttcaacactgcactattgtcaccaagatcatgaattcaatgttcagtaggtcatatagctttgttctgaagtaaggccaggaactctgctccagacaattctcatcatcaactttcctggacatggacaggattaaccacaggctgatgaaatgatcagcttcaaaaattattattaatgaaataaaaaacatcatgccctatggattacagaaatacctttgttatttagtgagagttggtatgactttctagctgaaaatacaacttactaaaataccacagttttcatggattagatttataattgaacatgaaaaataatatggctagaaagtaaaaaaaaattcctgaggaatcctaaagttatactttgccatactgtgaaatgttacaatatagctatcatatacctgaaaacgtgtatctaatctcagaaagttctggaattctatatttgtatgttttcagtcatgccttggaaagtactaagaaactgtcaagttctgttattagtaaaacaaatgtctaaaagctataacacaaaggttttagagccatattctcatttatcttgtagatatattaacatttgataatacaatcaattattaaaacacttaaattgtcagcactgaagagagaagagcattgcagcagaatgaaaatgccaataattagcagtctgtcatctgacactgcaggagcaaaagttaaggcttaggagaggagtgatagcatcttcattattgctcttaatgcaagaaaagctacctaaccgcaccagcttttgtttgccaagaaaattatatcttaatggcgtcacatgttatagagggcttccttttgttggcttccattaaaagaagtccatgctaagaaacaacacatttctcatgtattgtcagcagcatgttatcagtctattcttatcacataaagccagacatagacaactctcaataagccattctagcagaggagataatgggaatactcaatagttatgtttgccatttgaatgtatcacatattttgctgaggctcctataaaagtaatttaaattaaaaactaccacctttaaactcatgtcaatggatagcaaagtgtatgaggaaatgatgctggtaatgcagagagaaatcataatagtattagtagttgccatgagaagaaaaaagcagatcacacatgaatggagaatttaaccaagggtagataataacttaaatatttttccattcatttttgattagttttatattgagagaaatgtttcaacttactctaaagcatttagtggaggaattggttcagtccactatattgccttatgagtatacatttacagggtttaagatcctggggcctcaaacctagacaaagaactacaaacaacctgggaaaaatgatgataccccccgccaaggaagagccccacagctgtttatgctataacaaatggtcagccctgaacacatgtacatacatgtaacactacacagactgaaaaggttgcatttatgcatttaggaggcacagaatacacacacacacacacacacacacacacacacacacacacattatttcttacataagctagatagggtaggcaagaaaaagtacttcgaaagacaaacatctaaacataatattgaacttttgtcatgtgggaaagagaaggccataggaggtctcaaattgagatttctgataatagagctttaatgagtacagttacccacagagaatggaagtagtgtgtgaaaggatgaggctaggaactcaggttgtacacattcatctgatttccatggctttgcttgtgaagcaggaacaggaaattcatgaagcatgtaagttatgtagtcaggctacctgagtttgatttctatgctcagtataaaagacaaaaagggcgttattattatcatctatagtcaagaacagacaacaaggctgagtaaaaaattcatgtacatttcacatagaatctactacatactaacaatatataaatattaatatataatttagaaattgttgattttattgtgagtctatgacataaattcatcttcactcacaacaaaagttttgtgatatagtattagattagcaattatatttcatagttccttaaatagcaatcaaaaaataggaatttcttcgaatttgaacaacaaactacctaagacacatttgtttcatcaaatttctgtattttataatggatcaaccatattattttaagatgttattagctctagtgtaataacatctagagtaaacaaatagctatatatctaccagacttaacgaattaggcatgaaatgcaggacacacgataatgacatattgttgtgaaggctgtattctaataaacctgccacatgaaaagtaacaggcaacatgaaaaagtaaagaaattaggttcacagaaagctagagattcttataacagtttctattccaggaactggaaagagttaaaagtaaattgcctagaagtccacaaaatgttattttatggtccttaagaagagaatgaataatctgtgatatattctacacatgggaatgcattgaaagcaacaaaagaggcaacaaaaggaactgaagctcagcaaggaaagaaatggtataaaacttgtggtttgtcctgaagctgaaaaattgactgacaactgccagaattcctgatactgtgggaagtaaatggtgagtgctgcttctttttcagtcctgaggatatagacagaatcacatgcatgctaaacaagcatttcatcacaaaactacatcccaaccactaaagctgggctttgctaatcatttaattgcagggataatttttgatatacaaattggtaccctaacaatgataactggaaagattaaaatgatttcaacatgatcagtctatgcaaaataacaaaatattaatctactatatctataaaacagcttttaaagttacaattttggattggatttgttatttcacatacaacttcctcaagtgacttacaataaatgtatgacaacacatttactttataaggcattacaaaatatttaaatgtaatgacattaatgataaaatactaatgagtgtaaattaaggttactagaaaactgttatgctcacatattaatgactaacctataataggattaaattcatggtcatctaaaagactgactaaaggtatgtatattcaaagcttcaggaaagtggtttttttctaacttaaatatatttagcagaacacaaaaagtgcttcattcttcttataaaacatacagtctgagattggcttaatatatagttgaaacaaaccataatattttggagctttacatgtacctgttaaaatttatacaattttcaatttaatttatatttgataaaaataaagcaaatttatttagaatgatgattcaaagtgactgaaaagtttgaatttgcgaatgtaattaaaagaacaccttatcctggtgatggtgtcacaggcctttgatcctagcactccagagtcagaggcaggaggatctctgtgagtttgaggccaacctggcatacaaagtagttccaaaaaagccatagctgttacacagagaaatcatgtctcataaaaacaaacaacaaacaaataaaatcctgatacgatgcttagtccatattattcagaaagggggaaaaaaggacagatagcctgtctacctcatatctcagaaaaggaaataaattagtgcaaagcatgtacgatgttatgaatcaaactccaaacattgataatgaaaaatttatttcattaatttatacatgtatccactgtatggtaataaaatattactagacaaataatgccacaaaattatattgtccttaaattacaaataaatgaataggaacaatgaagcagcactttgcaaatggtttgaaaatcagcctcagaccgagaattaatgtcctccaaataaataaatcaatttaaataataaaaaacaaataaatacataaatgacagacccaaaatcatcacactgttttctcagtgatgcattccacagagataatgaaaacagaaaaaaaagacccttaatcatagaaaaaataactttatttccttcagagaataatttgcaacttgcttcttcttgttcctgctctggagaactgtctttagagctagggtaataggatgacacatttcacaagataatacaatatatgtggtactacatcattaactgtgtgaaaaagagctctgttaaactatgcaacaaaatgcgcaaattactaagggcagaaaagtcattaagcctcattgctacaacatagggaagtcattaaaaacaaaccttggctcaaaatcacatttttgtcacttactacctatgaaatcaacaatactcctataaagtcataaattgatctagacttgaaatggagactaaataaaatatggtttcaacaaactgcagtttttataaaatatcagatattacaacatcatactaccattgaaatgattgctgttattaatggtagtcactgtagtgacagtattaattacagaaggattacaatcactgttacaatctgtaaagacagccattttaaaacctccttgcttagaaggctgaaggtagaatatctgaaaatctctctaaagttgctcacttatattgatatatatctcagtctccaaaatttctaattacctcttttacataaaggaatgctaatctgatgatagaaaatgccagtataaaaaaataaatgtgtgagtcactctaaattgaaactattaacatgttaataatgggggattatgtaaggtgataatgataatttacagaaaaataaagaatgaatagacaataaaataatggaattaaatatagctattaaaaaggactgaatgttgctaacgttctcctaaaattcacaggttaaacctaaggctcaaggagatggtattggaaacacagcctctgataggggattccgtcagaacacagaccccatagagaaacctcagtcctttccccatatatggacacatgtgaaggcatcatctacagcttccagtgctggatctggaatttcccatctcgggaactaggagaaatatgtgtcattaagatgacacaccctttattaggtcactatttccctctgggcatggtaacaccattgtataaagcatgtacacactaagactaacatctcattattgtcaagacaagtgcaaaattttccatattatgaaaacggacataaattagattgtatcaatcttttgtcttctcttttgttcacccaacatagaaagctgtgctatgcaatcaagcaacactggatattttcagagtcagacagctgatgttaaaactgagaaacacaatttaaaatatcttttagaagaaaactgattttatatttatcatcaaactgtgttctaccaaaatctgaaagctatgccggatattataattatagcaaagtgaaatatatatgtacttgaaatatttataacacctcatttttcagttattattaaacttaaattgcactgtagaaatatattattgaagaagctaaattttattaacctcttatgtttatttcttatattacctccaagcaacattaaaaccaaagaaattgcttacaagttccaaacaggcactatctttgttcttcctaaagcctctagagaaccctagaaattctaattagaattagcagttataagctacacattttattattatttcaattttagttaatataaactatcattactttaattcttatatattattattatgtataattactgtacttttaaagtcaaaataacactatcattatagcctgcatggttatgtctcaaaatatcatctaattgactaaaacataactagagaacaaacaatttccaattgttacagatatagtgtatattcagaaagactacagaatcttctgtccttggtgtttgtttataaaaacacacatagacatgtatatacttatattctattaatatagacaacatgttgaactacattttatatcatggcattatgatgtcatatgaaaacataaatctcatgataaggaaaacactggatttgaaaactagaagataccatacacatgagaaaggggctcacactattcgcgagtaccattatatcttacctaggctagcaatatttattcacagttagtgaattagtaaattagatccatcatacaaaccgaaaatattgacttacatgtgcactaaaaatcctaggattagttatcatagtttggtatccaatatggggaccaggggtttggaattcatatttccactgaaaatatcatgcaaggaatgaaaacagctctgacataagaagattattccttgagaaggagaggagcagaggggtgaggaagacatgagcaagcagaaaggttgagtcaggggaataatttaagaaaaacaagaatggagataccataatagagggagccattttagggttacagagaaataagtcactagggaaatatctggagatctacaaagatgacaccagctaacaatctaagcaacaaaggagaggctaccttaaatgccctccctggataatgagagattgatgactgacttatatgccaccggatagccctcatccagcagctggtggaagtagaagcagacacccacaactaatcactgaactgaactggaatccagttgcaaagaagaatgagtgatgagcaaaggggtccagaccaggctggtgatgaagggaccagctccccatttcggcagccatgacagtaactcgtgctctatgatcttgtcttaatcactagaggttaggtgcctgcctcgtgacaaggaaccaatcagaagttagctggtggcactatgctttatgaccctgggtgtactttacggacaaggacaagcacacagcaatggcaaagagcatagcaaccaccctggcagggcctatgtatgggccataacaaccagttgaccaatcaacacagggcaagccctccaattctggaggcacaccaataatgagcctgtgcgtacctctagacactccccttacgctgctcttcaagatctcttgggaggccctaggacttgtgttttgcaagccatctgccatggcgggtgggtgaaagacccgagctaacatggtgttagctcgttaaattacaataaagcagtttgcatcaagctctcgaatctgcctggtgagtggggtgaccgaggttgtggcctgagaccccagatacctgagttttccgggggtctaacagtgaaacccacagaaacaactggcctgaacaagtgggagttcttggtccccagactgataactggaataccagcatgggactgatccagcccccatgaacatgggtttcagtgaggaaacctcggaaatctacgagacctcttgtagtagttcagtacttatccctagcataggtgtggactttgggagcacaatccacatagagggatattccctgagcctaggccctatcccaaaggacatgatagactctgatgacaccctatggcaggcctcaccttccagggggagcagaaaggatatatgataggtaggggtttagttggggggaggttgtagggaaggaggggcaggagagggaactgggattgacatgtataacaatcttgtttctacttcaaatagaaaaaaagaagactattcctctaggaaaaggaatgctatatacatttcatagtttacatttgatcttttctattacttattaacaatgcaaattgggaacatattaggaatttctatcactttggagaaaaattctttatagactatttttttttgtcatttctgtacttcatcagattctcgtaaggtgggcaaatgttcagagctagagacaagctttcccgacagtagctctgttcacctaaagaggaaaagagcaaaccaatgtccttcactgtgaagttctcaccaagtctcctcactccaaagccaacagctgctgcgtgtgctttcagcacagtatgttctgctcttctccccactgttaagttaataggagaccataggcttggagctggctctaagcttccagttcaacctaattgagtacatatactttttgtaacaaccagctgaatttccaccagtcacaaagactcatgttttaatcgcaaaatgatcaaacaaggcaaatgcctaactatagtaagtcccctgatttctatgttattttccatgcttagcataaaaaaacctagctgctcatatgactcccttctgaccctgggtgttacaaaattcatgggtagctctttgtttgctcaaataaattcagttaagtttattctgttccctttccagaaagnnnnnnnnnnnnnnnnnnnnnnnnnnnnnnnnnnnnnnnnnnnnnnnnnnnnnnnnnnnnnnnnnnnnnnnnnnnnnnnnnnnnnnnnnnnnnnnnnnnnnnnnnnnnnnnnnnnnnnnnnnnnnnnnnnnnnnnnnnnnnnnnnnnnnnnnnnnnnnnnnnnnnnnnnnnnnnnnnnnnnnnnnnnnnnnnnnnnnnnnnnnnnnnnnnnnnnnnnnnnnnnnnnnnnnnnnnnnnnnnnnnnnnnnnnnnnnnnnnnnnnnnnnnnnnnnnnnnnnnnnnnnnnnnnnnnnnnnnnnnnnnnnnnnnnnnnnnnnnnnnnnnnnnnnnnnnnnnnnnnnnnnnnnnnnnnnnnnnnnnnnnnnnnnnnnnnnnnnnnnnnnnnnnnnnnnnnnnnnnnnnnnnnnnnnnnnnnnnnnnnnnnnnnnnnnnnnnnnnnnnnnnnnnnnnnnnnnnnnnnnnnnnnnnnnnnnnnnnnnnnnnnnnnnnnnnnnnnnnnnnnnnnnnnnnnnnnnnnnnnnnnnnnnnnnnnnnnnnnnnnnnnnnnnnnnnnnnnnnnnnnnnnnnnnnnnnnnnnnnnnnnnnnnnnnnnnnnnnnnnnnnnnnnnnnnnnnnnnnnnnnnnnnnnnnnnnnnnnnnnnnnnnnnnnnnnnnnnnnnnnnnnnnnnnnnnnnnnnnnnnnnnnnnnnnnnnnnnnnnnnnnnnnnnnnnnnnnnnnnnnnnnnnnnnnnnnnnnnnnnnnnnnnnnnnnnnnnnnnnctttccctattgaaactactgaaacgctcatactctcaactctgggttcttcatttttccaattgtaaattagccatattctatgctccccaagctttttaaaaaatgtctaacatttactatacttagactaaatatggtaatcttccatctttggtcaataaatcaggagttctctggtgtaggaagaaattaatcagttcttccccatgcacatactaggaacttaacgaattagttaagtgaaatgagagacacagccaccccgaaaaatagaagtaaactgctttgtagtggaatcttcaaaataaattttctctaaaatttaagaatcagtaattcacacagaaagtataatttcctggaacttttcacgcattaaatattttcaaatctaaatattataggtattaaaattgggacattttaaagcttcttcctatttagcaattctaagtgtctttaaatttttaaacattcacttgacaacatagactagtaatgctttatagtgcatttagtgataatggagacatgagcctccaacagccttgcagtagggggtagttctcaaaaggttttggaacgctgagtctaacggccttggaaataggtcttagaaacaagagcttggtggctcattccagaatggtgctgattgagctgcaatgagcagcagaatggagaagaaagtagtgccctaaagctatgagagccagggcaggacagcttaagtttgctggagccagaaactcctgctgatttcttcctaagcctgccatctattgaccaaattatgaatcaaagcactgtgagtggcaaagaacttccaagggtacaggaagacaatcaattcttaagagtgttaattaaagcatgtgttgtgtcattaaaatttgtttggtctattgcatgcacatactgaatattctttgatttttaactgatcctggaatgtctcttcagaaataaatcaatgacaccaaagggttccattttactaatatgtacataaatattcaaagttagcaaaatgggggtgatcctgcatagagatttgaaaaatgaaacttgaatggagaggcagcattctatgcagtgagtacgtgatttgaattatttggtttggttttgctcttggtggctaaggctatggcaggaggattaggaatcccctttttgtaactgagtatatctagcaagtacaaaaaggaagaagagatcttctttttcccaacaaacaggtaaagtaattgtcagtaagtaaaacacaacacacacatactcaacatcataggagcaaaagagaaaaacacaaaacacaaaacatttattctctgctagatacaaaacagtgagtatgacagctacattctattcacattatagatgagataattcagttagtggaaatgttatgtactacaattgatgaaagtagatgtgactgttgcacttagaactaccactaataacacactattgtaatgatatttgaatatatttgctatatatatatatgtacatttgatatatatccaaatctcctttatgatttacccttctgtctctattcttactttcttaatttgtgaaatacacaatctaggcttatttaatcagatgtatggactagcctaactctgcaattttataaaatctgtttggtgtaggattcaacacaaacatatcaccaagtaaaacagcaaatgttcaacggagtgagaaaatcagaatgagaataatcacagaaaaaaaagttaaaagctgcctgtgaacagagaagaatccattcaacatcatgtaaaacagaaaaagtaaccaactaaagcatctcatgcttcaaatcttacccctctggagacgaaaaaagaactgccatgttctaagaccatcttgggctacagactagcctaggcctcagagtactttctttctcacctcctgaccaaaggaaaacaaatgtattcctaaacatttaatacttttacctataatatgggcaaaagttgtagagaaaaagacacagattgagtatccaattatccaaaatacttaatatcaaaagtgtttcagctttgttataagattgtagaatatttacatggatgaaataaaacatcttgaggaaaggacacaagtctaaacaagaaatttgctgacgttccatatatacacagtctgaagataatactatccaatgcttataactgcatctctgtttgttttaattaggaaatattccttgtgtatattactgagtttcacaagcctatttttatacaattatatagcacacattggccatttccctgcccatatctgtcttttccccctttttctttttctctttcttctacactcttggtggtcctcctatgattccacaacaaccaaactcatggcattagatacggaatttctttcttgtatactattgtataatactggtggtcaacttttctgattctgtaacaccaatgacttagattagagatgttcaacatgaattcatatgtactcttggcaacactttaaactgataaatactggaaggcacaattgtaatataattcaaattattaaatgaagaatacacttgtagaatttatgctacagcccatcccacaaaaaaggacatacagaatcatatatgccacttaattttagtagcagtaaaacaaagtgtctgaagccaggggaatggttaaatgtactaacacagaaacacaaacacataattatataaacatgtaaaaagaacaaaattggtaaatatagaaaaataccaatgtaaattacagatgggaaggaaaaacaatggaaaatgtttttaaatgtttcctgacacatactatagatcgtaatgtaaaaaatgggtaataatggttttctttccagaaagtctgagtctagaattgaagagcaaatttctcctttctgtcatcatcttacgtagaacaaacaaactacatgggtactttgttataagcataaatatttagtactaaaatataattatgatagtgatacgtcaaatcattggaaaaattttaaacatgaagacaactataacaaatacgaaaaacatgaaaactactaacgctttttttcaatgcaaaagttcttcagtacactctaatcaccacagatctccccctcttcatctctctcctcctccattctatctctccaaactgacaaacaaatcagacatatggcaaaagcactcattttgaagacaggatagcatgcttccatttattagttgtaaagacttatgtacaaaacttaatgcctacatttaattgaactactaaaaggttcaaataaattatgaagaccccattgaccacaatgactaattgtgagacctacatattacgtgaatggcatgtaggaaacacttgaaacgttaagggtataatcataaaaagatatgcctttttcaaatccacaagaatattttgtgaggataagatttggatattaactcacaacatatgctcataacaaaaactatgagatttcctgggaaataaggttgacaaatgatgtatatttaagaagtgagacagtgtaagccctatggtaccagtcttcctcaaatatcaaccataaatttcagagtcattagtattccatgatgcaattattgtgatgcatggtaaatcaaaaaattaatatcctattacttagcaaaatagcagttatatgaggaacagcacacatattaaataataaagtctataccttaaataataatatctaggcaaaacaaatttggctaaagagtaaaacatagctagtacatgaatttatgtctgatcccacttattgtgaatagcaatacatacatatatatgtagaatgctttggcagaaatatgaattccaggacatgaggcacaggaattaataatgtgtaaaaataaaaggtacctttcttctgggaagcaaatgtcaaggccagttttgcaaagagatctggagtctcaaacttgtcttcttttacttttagccagaaacagttttccgataattctctaggctcaatctaaaacaaaataacaatgataagttttagtgttgttacttactgtttaatttttcaaagactgtctttcctttgttcatctatgcactataacaatttcaaatatataaaattacactcataaatattcagaggaacacttacaattctgtcattatacagaaatgctacacaaaagtaatgggtcataaactaaaatacatttgaaagcacctactgaaaagaccctcaaaataatatagtatattcctcttctacttgcatacattatccttgttccgagattttttttttaatttttgatgttccaattattatattttactgtgaaattttaatacatgtacaatatgtaaattgctttcccttccctaaaccatcttgtcctcccatttgtttgggccctccctccatgcaatttaatttaaatgtttaaaatgaaaacacttactactatctaaggcccaaaaacaccaaagacaataggatcttaacaagaaataatattaagaatgtgacaatacttagcatttacaattatgaaattatttgaatcatccagttcatggattttgcaatttgattttcctttgtctttaccatcattttgacgttttgagtaagctacctgtgatctaggacacacatttaaagatgaacatagggtgcttaacacagaaaggaaagcaataatggcagtaatcacaatgttaaactcacagcaatgcatttctcacacattgtcagtcccagtagaagcaaaaaaggtccctagagttagacttacaatcttaccttggaccagttgattcttttcatggatacttctggcttatatagttttttctgcttcattccaaatggtagctcaattggtactgatgggggaaggtgaaatcctccagggggtggtactggaggagggcctccaaacaggggtgatggtagtggtggtgcaataccaagaattccaggtaacggtggcggaggaggaggaggaggtactcctggaagtggaggaggtggtggtggtggaggaggaggaggaggaggtggtgggcatggcccaacagatgacagtggagttgctggagatggtgcatgtaggcctgaaactgcagatggatctccctgaaacacaaacaagtttaaatgtttccagaaatgtataacacaaagtatgcacatctgttaggagttaggatttaagactttatatacctttctaaactttcaagattatacattttatcagtataaataaagactttttggtatacacagtttagtcctgcagacaatgactatttctgctaacattaataaaaggaaaatttgcagtttgtaagatttttatgaaaagctcttatagaatgaaacactacctttcactataaacatagccaaagaaatatgaaatatggcttaaaactgttaacctagcttattaaaatttgattaaagtatgacaaggtcatggattcaaatcccttgggtgtcaattagtctaatagagagtatttcacagtaccaataatttagctgtctccacataaaagtgactaatactaagtagaatccatttgcatagtaatataagcatatcaacattttacattattggttccatttgtgtttattataaccttgtaacatagataggacatttaatctttatctcaatgcttatagatgaggaaactaaacgcaaaaacattaccttaacactgagtatataagtcatttactggtgtgcttgccttacatacaggaaaccccaagtttgaacctagatactatgaaaagatgtctgtaatgactaatcaataaagcacagtggaaaacatgaggatctacatttgaatgtgattcttctctttcacttctgctctcttcatgaaagagtttcatttgtcacagaaattcactcatacacagagttcatgagaagaaaatacctcggttctaatgtcaaaaactaacttcaacattgttctccactggcagttaattacagatgaataacttaagaattttaacttaagtaaatatatactctagaagattgaagcctctcagcaccaaatcatgtttatcctcattgaataattaaaatttaaataataaaactgagatataatatagcagtgtagttgatactgcttgctaggtcacgctggcccaacctggaatatatagaaaatttcagactatcctgggtcatgttgtgagagtgtaccaaaaaaaaaatagagagagagagagaacaaaaaggaaagaagggggctcaccatcatctgtgagtagataagtataagcaagagatggcttttctaacatacacaaaacaaacataaaaggtactgcagatagccaggcatggtggaatgcatctttaattccagcacttggaaggcagatgtagagggttttctgtgagttcaagacaatcctggactgcacagagaaccaggctctccagggctacaaaatgagaacctgtctgaaaagtaaacttgaaaacaacaaaaggtacttgatgggggaggtccttctgtgtatatgtttctcttattggttgataaataaagtgcttttggtcaataggaaagcaagacaggtgggactaagagtcaaggaggattatggaaaatgtagtaaagagatccagacaggaagtaacatagcaggcagactcagaatataagcagggagaagaaggaaatcgtccacttgctcttcctcttccatctgctctcttctatatggagccaccatgtgatcctggaaagatgacttctgctgatgtcctcaataagataaatcttatctcatgggatcagaactccaccagcaggctccagcacacccagagactgacaaagccctggtaacagttccgcttccatccaatggcccaggtaggacaggggctgcttccggttccggttcccctgccctgctcgggaatacctgacacctgggggaagtgcacgggattcgaactaacacaaaatatccgggaaatattggacaccatgaaaagaccaaacctaagaataataggtatagaagaaggtaaagaaatccaactcaaaggctaagaaaacatattcaacaaaatcatagaagaaaactttcccaacctaaagaagcatgccaatggaagtacaagaagcctacagacaccaaatagactcgaccaaaaaaaaaaaaaaaaaaaaaaaacccccccccccaaaaaaaaaaaaaaaaaaaaaaatacctcctcgccacataataatcaaaatcccaaacatacagaatgaagagaaattattaagagcagcaaaggaaaacggtcaagtaacatataaaggcaaacctatcagaattacacctacattttccatagaatctctgaaagccaaaaggtcctggatagatattctacctacactaagagacaatggatgccagcggagactactatacccagcaaagctttcaataaatataaatggagaaaacaagatattccatgacaaaaccagattcaaacaatatatatcaaccaatccagccccacacaaagttctggaaggaaaactgcaactcaaggaagttaactacaaccaaaaaaatataggcgatagacaatcccactttaccaacagagaaaagaaaaaaggaatggaaagccacacgtaatttcaccacgaccaccaaatccaaaacaaacaagaatgatcaatcaatggtcattaaaatccctcaaaattaattgtcttaactcacccataaaaagacacatgttagcagaatggataagaagaaagaatccaagcttctgcagcataaaagaaacacacctcaacttcaaagacatacagtacctaagaattaaaggttgggaaaagattttccaattaaatggacccaagaaaaaagcagaagtaccaatcctaatatccaacaaattggacttttaactaaaatcactcaaaagagatgaataaggtcacttacaactcatcacaggagaaatccatcaggatgaagtcttatttctgaacatttatgccccaaataaaaaggcatccccatttataaagaaacattgctaaaactcaaatcacacataaaaccgcacacacttatagtgggagacttcaacaccccacactcaccactggacagaaacaccagacagaagcttaacaaagaaacaaaggaactaatagaagttatggcccaattgggcttaacagacaaatatagaacattccatccaaataaaaaacaaaatacattcttctcagcaccacatggaaccttctctaaaatagaccacatactttgcaacatactaaacctcaacaggaactaaaaaattaaaataaccacctgtatcttatcagaaaaccatgctttaaagttagaattcaacaacagcatgatttgcagaaaaccaacaaacaaatggaaattcagtaacgcccaattgcacaattcctgggcccaggaagaaatttaaaaaatatgaaattaaacatttcctagaatttaatgagaaagtggacacaacatccccaaacttatgggacactttgaaagcagagttaagaggaaaattcatagcactaaatgcccacatgaagaaacaggagaataatcacactagagaattaacagcacaactgaaagctctagaacacaaagaagtcaatacactccggaggactaaacaccaggaaataatccaattgagggctgaaatcaataaagtggaaactaggagaataatacaaagaatcaatgaaacaaagagctgattcttttagaagattaacaagacagaaaaacctttatccaaacttaccaaaagaaagagggtgaacatacaaattaataaaatcaggaatgaaaagaaggacataacaacagacacagaggaaattcagagaatcatcaagtaatacttcgaaaacctgtattcctcaaaattcgaaaatatatagcaaatgaaaaattttctggacagatttcacttaccaaattaaatccagaacagataagcatcttaaaaagacctataaccaataatgtaatagaagcagtcatcaaaagcctcccaacaacaacaacaaaaaaaaaaaccccaggaccagatggattcagtgcagaattctaccagaaatacaagaaacagaaaataccaattctcctcaaagtattccacacaagagaagcagaagtgtcattgccaaactctttttaccaggcttcaataaccttgatacccaagccacacaaagacacaactaagaaagagaactacagaccaatatccctcatgaacattgaagcaaaaatgctcaataaaatactggcaaatcgattaaaagaacatatcagagaaaccatccaccatgagcaagtaggcttcatccaagggatgcaaggatggttcaacataagaaaatccatcaatgtaatccaccatatgaacaaactgaaaaagaaaaaccacatgatcatctcgctagaagctgcaaagcctttgacaaaatccaacatcccttcaccataaaattcttggagacaacaggaataacaggaacataactaaacatgataaaagcaatctacagcaagtcaaaagccaacatcaaattaaatggaatgaaactcaatgcaattcctctaaaatcggggtcaagacaaggctgtccactctctccacacctcttcaatattgtccttgaagttctagttagaggaataagacaacaaaaggagatcaggggatacaaatcagaaaggaagaagtcaaattttcactatttggagaagatatgatagtctacataagtgacctgaaaaactctaccatggaactcctaccgctgataaacacattcagtaaagtggcaggatacaagattaactcaaaaaaaatctgtagatgacacattcatggagaaagaaatcacagaaacatcactctttacaattgccacaaacaacataaaataccttgggctaacgctagccaaaaaagtgaaagacctgtaccataagaattgtgagtcattaaagaaagaaattaaagaagatgctagaaaatggaaggatccccccaagttcttggataggtaggatcggcagagtaaaaaacggcaatctgccaaaagcaatctacagattaaatgcagtcacaatcaaaatcacaacacaatttttcacagaccctgaaagaacagttatcaactttatatggaaaaacaacagatgaggatagccaaaacaacaatgtacaataaaggaacttctagaagcatcatcatccctaacttcaagctctatttcagagatataatcctggaaacagcttggtattggcaaaaaatagacaggtagaccaatggaatagagttgaaaaccctgatactaacccacacacctacaaacacttgatttttacaaagaaactaaatttataggatggaataaggaaagcatcttcaacaaatggagctggcataactggatgctggaatgtagaagactgcagatagatctatgtctatcgccatgcacaaaacttaagtccaaatggatcaaaaacctcagcaaaagtccagccacactgaacctattagaagacaaagtggaaaataccctagaatttattggtacaggagactgcatcctgaacattacacaggtagcacagacactgagaccaataattgataaatgggacctcctgaaactgagaagcttctgtaaggttaaggacacagacagtaagacaaaacagcagcccacagactgggaaaagatattcaccaacccacatctgacagacggctgaactccaaaatataaaatgaactcaagaagctagtctccaagacaccaaataatccaattaaaaagtggggtaaagaactaaatagacaattctcaatacaacaatctaaaatggctgaaaggcacataagaaagtgttcaatgtccttagccatcagggaaatgcaaatcaaaacaactctgagataccatcttactcctgttagaatggccaaaatcaaaaacaccaatgacagtttatgcacgagaagatgtggagaatgggtaaactactcaactgctggtgggagtgccaacttgtacagccactttggaaatcagtatggcgactcctcagtctaccacaagatccagcaatcgcactcttaggcatatagccaaaagaaacacattcatacaacaaggacatctgttcaacaatgttcatagcagcattatttgtaatagctacaacctggtagcaacctagatgtccctcacctgaagaacggatagagaaaatatggtacatttacacaatggagtactactcagcagtaaaaagcaatggaatcttgaaatttgcaggaaaatggatagaactagaagaatccattttgagcaaggtaacccaaacacagaaagacaaacatgttatgtactgactcatatgtgtgttttagacatagagtaaagggttaccagcctacaattcatactgccagaggagctagtaaaaaaggaaaaccctaagagagacatatatggtcctccagagaaggggaaaggggcaagatctcctgagcaaattgggagcaagggaggaggggggagctatgagaatgagaagggggaagaagagggatgaggaggacatgatggagcaaaaaggttgactcattggaagaatagaagaaaacaagaaaggagataccataatagagggagaaattttaggtttacagagaattcaggcacaagagaaaggtctggagatccacaaagatgacaccagctaacaatctaagcaacagaggagaggctaccttaaatgccctcccctgataatgagattgatgactgacttatatgccatcctatagccttcatccagaagctggtggaagtagaagcagacacctacaactagtcactgaactgaactggaatccagttgcatagaaggatgagtgatgagcaagtggtccagaccaggctggtgaaacccacagaaacagctgacctgaacaatggggaactcttggtccccagactgatagataggaaaccagcatgggactgatccagaccccaggaatgtgggtttcagtgaagagacctcagaaatatatgggacctcctgtagtatttcagtacttacccctagcacaggtgtggacattgggagcccaatccacatagaaggatactccatgaaccaagacacacgggggtggtcctaggccctagcccaaaggatatgacagactttgatgagccctatggggctcacccttcttggggagcagaaagtatatgtgatagataggggttttgttgggggggcggtagaggaggaggagagggagagggaactgggattgacatgttaaaccatcttgtttctaattcacataaaaaagaaaccaatttgccagcagcattttaaactattataagactctgtgtgatattctgcgtgtacatgtggctgtggggcttgggtagatggagtaaaggcttatcattacaggtactgtggtcaaatgtgtcagggaagggcatgagttaagagaggtgtcttcaatgtatggtatctcaccatatttaatatgttaacaagtgtttcaaatctctgagtattttatgtttatccaatttagtggcctatggaatattttctttgtgcaaaatcattaaatatctctaagtaatgtgttttaatgttggcagaatgaaaaggattggccaatatgttacagatctcatgaaaggaagggaaattgaacagcaatagaggttgttgtaactaggtgaatagtccgagtctatgctgcaaagggagttaagtataagacatcccatgtcagaagggtttagatatttgtggtagagattttctttaatcccatatacaacaggcaagcagtgtataaaataaatcctccagttataacaattaagacaatgttttgtggggattaattgacataaaagtatgaacttgaagaggaaaagactatagacaataagaaaattaggatacaactattatagttcaatcaaggtgtaatgagagtggacctgaagggattggggtcctgatgaaaaggtgaaaaaagtcactggaataatttaaataaaataactaatttcatttgtcaagagcagggcaagaaacaaatcaaacttcagccttaaaaaaagtgaccaattttaaaacaagtcgaaatggagactaaggtagcttaaggaaactgaaaagatcaaaaatattgaattttagttcaatacaaaagacatgcctatgaggacagctggaaatgcaagatagactcaaatgtcttgacatacaataaaagatgatatatgagcatatgaaactgagttggacatttgtgcaaggaagtacaaagcagagaaaaatgccaagggcagagagaaaacagatacctcacaatcagagaatgagaaaaggagagaaacaaagttctcagacacacagaaagggaagtagaataaaactgacaggagaaacaaagacttaaatagtagatatgaatgatactggctatgggtatcagaaagctaccaccataaatactttgcagcttaccagtgacttaggaagtaatttctcggtatattttttgggacacacatagtgaatcatgtacctactggacattatctatttaaaggtagtctcttcaaattcatattattcttttaagccacaaaatgtgtagagattacacttaattttaaagtttagacatcttactaagtgtttttctgtgcaggggaatttaggtagaaataacgtgtatagactttgaatggaagatagtctagatataagatctcaagaagtcttttggttaattaaaattcatgagcatttctatattctttttgaaagaaaatactatgcactcaatttttcaaatcatcatgaaaatttcatgtcataaacagtttggcttggataatgtattctgctaaaattattcagtgcagttcgagcaaatgaaacctctatttatttccaaaccttaaaatgatttactaatggaaaaataaaatctgtacccttttcaactaatatgtgaaactgtcaacaacaaccaaaaagtctgtgatcacagttttcccactgactaacaagatagttttctagccacaaattcactgtgaccaaagtctacactttcttccattacctgtagtctaagttgctggatttctgtttccagttctttgattttttcgtctcttttctgaagctctgcttgagcttcctgtcgagctgtgaattcttcatcaaactgcaatgaccatgattagaaatgtacggttattgatacttattggggtaagatttaaaggacattatatagtaattatgtagcatgggttttgctatgctgcattcacagatcactctgagagataaaggtctttctctgaaaaactaagaagccacttgcagaaattttactttttagaaaaactgggggaaaaaaaggggtggataatgaagcgtctgttcacatgtaatggaaagtttattatagaaaattcaattgtggaattaatattgtttattaataatttgcccatatttaatgcattttcaatttcttaagcatatttaatcttaaaaacaatcgcatttttgaaatgatcggatgtatgtacattaacacaaaatggactgggagattattgttgccataaacctcattgcttagcatccaaaaagaggtgcttcataaaatctgactgcacaatgatatacactgaaattctactctctatcagatggtttaaaaaagtcctctctaaacaattcaagaaaggaaaatgagggaagaaaatatggttccaagggcagaggtgcttgtgccaaggcataacaacctgagtttgatccttgaaccccataagatggcaggataaaactgcatcctttgacctcgccacatgggcagacacacaatagtagtatgtggacacatgcacaagcatgtgtgcatatgtggatggaccagaataaatcagtaattgcataatacatccaagaaaaaagaagacaaaaggtgtgaaaagtaaaaatatggggtactaaagataccaactctccaaaaggtggaagtacacttcctgcatcatgtcctagctcttacctcagtcattaccctaaacagatgtaagttgagcaacatatttacaaaaattctgtacaggtctcactacagaatgctactttttattgtcgatgtcaactcaaataattttatgtctgtagataatcccaacaaaattatttgtttctaaaattgataaatcttaccatccaagactgtcatttaaagagtatgaaatatagagcaacacattctctgttagtaaatattcatccccctactaaacatgagctttggatattagagaatgctaaggtaagtcataaagttaaagaatgagcaatatgtaagagctgtgtcttgttgtcagatggctgaacactggggatcttttttgcatttgtttcaatattctctgaagccaaaaagagaaagatactctagtaattattaacagggggagctaggaagaaggacagagagtaaagagggaagagagagaggaaaacttgaaaacttgattaaacagttataaaattgtatataggatttcatcaaataagaaaaggtatattcccactcttaggaatatacccaaaagaagcacattcatacaacactgacatctgttcaacgatgttcatagcagcactatttctaatagccagaacctggaagaaacatagatgcccctcaactgaagaatggatagagaaaatgtggtacatttacacatttacactaaacagcacaaaaaacaaaggaatcttgaaatttgcaggaaaatggatggaactagaagaaaccattctgagacaggtaacccaatcgcaaaaaaggcaaacatggtatgtactcagtcatatgtggattttagacataaagtaaaggattaacaacctacaatctatacagccagctagtaaacaaagagaatcctaagagagacatacatggtcctctggagaaggggaaaggggcaagatctgctgaacagatttggagcaagggagtaggggggagggaggtaggtgaatgagatggggagaagaggaggggtgaggaggacatgagggagcaaaaagattgagtcggtggaagaatagaagaaaacaagaaaggagatgccataacagagggagatattttaggtttacagagaaatcaggcactagggaaatgtctggagatctaaaaagatgataccagctaaacatctaaccatagaggagaggctaccttaaatgccctcccctgataatgagattgatgactgacttatatgccatcctatagccttcatccatcagctggtggaagtagaagcagacacccaaactagtcactgaactgaactggaatccagtttcagagaaggaaacccacagaaacagctgacctgaacaatggggagctcttggtccccagactgatagctgggataccagcatgggactgatccggaccccaggaacaggggtttcagtgaggagaccttggaaatctacaggacctcctgcagtagttcagtaattatcccgaataggtgtggactttgggagcacaatccacatacagcgattctccctgagccaagacacatgggggtgggcctaggccctatcctgaaggatatgatagactgttctgaccccgtatggaaggcctcaccctccctgggaggtagaaacgatatgtgataggtaaggttttagtggggggggggactggaagggggggggggaagggggaagaaaacaggattgacatgtaaaacaatcttgtttctaattcaaataaaaaaaggaaaggtataaaaacatataggaaactgagtcaaccaacaaagtcaatttcataatgctaacagaaaaatcaataagtaaaagaataacctcacagaaaagaaattatgtgtgtatcatcaacatatatagccactctcagctgaacatttaaaattattttaatattcttaaattaaatattaaaaataatgttattaaatggaaaaatagaaaagatattttattgagtatttttgcatcaatattcatgagggatactggtgtttagttctctttcttacttgtgtctttccgtggcttgggtatcaaggttattgaatcctcataaaaagagtttggcagtgacacttctgcttctattgtgtggaatactttgagaattggtattaactattccttgaatttctggtagaattctgcactgaaatcatctggccctgggctttttctttttttctttttttttggttggagactttttttctttgacatatttttatttcctttttatttaatttttacaaaattataatttcacatgtcaatcctttctccttttccccctgcccccccaaccagcctcctttccctccccacctctgctccccatggagggtaaggcccttgacaggggctccccaaattccacaacatcatcctgggccaggcctaggctctctggttaggagaattttgatgactgcttctatttcattattggttataggtctattcaagttgcttacctgttgttgatttcattttggtaagtgaaatctatccagaaaattgtccatttcctttacgttttcgaattttgagaaaatgtggtacatctacacaatggagtactactcagcagaaaaaaaacaaaggaatcttgaaatttgcaggaaaatggatggaactagaagaaaccattctgagcaaggtaatccaatcccaaaaaggcaaacatggtatgtactcactcatatatggattttagacttagagtaaaggattaccagcctactattcacactgccagagaagctagtaaacaaggaggacccaagagagaaatacaaggtcccctggagaaggggaaagggacaagatctcctgagcaaattgggagcaagggaggagagaggagggagctaggagaatgagaaggggagaagaagagggaagaggaggacataatggagcaaaaaggttgagtcaggggaagaatagaagaaaacaagaaaggagttgccataatagagggagaaattttaggtttacagagaattcaggcactagggaaatgtctgtagacctacaaagatgacactaactaacaatgtaagcaaaagaggagaggctaccttaaatgccctcccctgatgatgagattgatgactgatttctatgtcacccgataaccctcatccagcagcctgtggaagtagaagcagacagacacccacacataattactgaactgaactggaatccagtagcagagaagaacgagtgatgagcaaaggggtccagtccaggctggtgaaacccacagaaacagttgacctgaacaatggggaactcttggttcccagactgatagctgggatatcaacatgggactgatccagaccccaggaacgtgggtttcagtgaggaaacctcggaaatctacaggacttcctgtagtagttcagtacttattcctagcataggtgtggactttgggagctcattccacatagaggaataccccctgagccaagacacacgggagtgggcctaggccctatcccaaaggatatgataggctctgatgaccccctatggaaggcctcaccctccctggggaacagaaaggatatgtgataggtagggttttagttgcaggggtggtggtggatgaggagtagagggggtgggaactgggattgacatgtaaaaccatcttatatttaattcaaataaaaaataaggggaaatgggcaaaaatttaatgaaaacaaaacaacaacaacaaagaaaaaataagacaaggttgagcttatatctaaatgaaattataatgtaaagactatactcattcaattcacttataaacacagaacaaaggaagaatttaaagttcaaacaagcctacccagagtaacaacatcatataatgaatgaattagaaaattccaagtagtctaaagaaaaagaaatgaggagacaagaaaagagaatagattccaactttagactgctatcaataccaaaacccgttttattttcaggaccaaagccagggccttattcatgatagaaaaacattctaaccaccaaacttcatcaccagttcaaaagacagagttttaaagggaaactaaaactctcccagttccctatggagttgtgtggtataagtgaatgctaaagaaaagaaatggaggaaattttttcggtggtttgattgtaactatgtattatttcaggtagctaattttattttatttatcattaagtacaaggctagtttttttcttacctaatgaattaagttgatgggagagaaggaaatagtaacaatcataccttaataggaaataaatcaacattgtataatgtttgcttttagtagtacaatgtactacaaaaatgaaaggacaagttataaagtgtcatacaaaatcaaatgttattaagggtacatacttacatactgggggttgaactattaatttaaaatgcaggactattattttggcatttaccttctttgaaaattccattgctttttgctcactttcttcaacttttgccttgtttacacaagcatctattcagatgaagcaaaaatgattagaaatatttgagatgaaatatctagctaattatggctgaaagtatataattctgaaattctcacatgaattatcattaaaagaaaattaatctacattataatatacaaataataccacattttctttctttagtattaaagcaaaaacttcaggcattaataaatatcttagatgaaattgtccctgaaattaaaggcgttaattataattcaacttttaccactatagaattcattggaaaatcacacattattatatagagactggaggcaaaaactccattttcaagataatgaaaactcaaaatgatcctctaaaacgctggggaggatgacgcagtggcattcttcagttcaggttttcagggaaaatcttttacttgacttctgtatgttgtaaaatggaagcaaacataaaattattcaggcctagttaataaacataatgcaaaaacctctttaatcttagattatatccatgtgcattaccccaatacttctccaaaggaaaatgaaacatatgtctgaattgcacatttatataaatgaaccataacagctttattacaatagttgaacactggaaagaacaaaactgtccaccaagaaatgcacattgtttaatattcatacataaatactacttcacaatatacaggaacaaactatcaatagatgaactataacatggatgaatctcaaacatatgatgcttgatgaaacaagatagtcacagagagtattgctacatgacactagttgcataagattttagtaaagaaaactggtgagagaaaattaagctaaaataaagtcagtataagagagattagtaggtatttctattttcaatgacacttttagtgacatacccagtgtatgagtagagtagggaaaaacaaggagagaagacagcaaatttttaaggaattaatacagcttatgatcttaaatacaatgatggttttaagtacacaatgcattaatatatgtatacatttattaatttatattgtaaagtgtaaaaaatgtacttaaaatatatttattagctatatatatattgattagcttatatattaaaatataagtaattttctccactcaaatgtataagaaagatttttatcaatttttattgattgttttatattattttatatgtatggatctttttcctgaatatatgtctgttcaccacatgtttgcagtgcccacaaagtccagaagaggacataggatcaagcagagtacagatggttctgaggtgtcatgtaggtgatgggtgtccagccaaggtccactgcaagaccaggaagtattcttaactcctaagccctctctctggctacaagtatttaatgtgtttcatgttgtaaaaatgttagaatgttccatacaatcaggaaagttgtattgtccaaaggggctttatatgggcaatataagtcatagctgacaatgatttttactttgatttctatctaagttccaatggaagccattgaacagttttagaaaaggatctgctatgatttaagaaaaaacatttgatgtacagaaatgtgaaatcggcccagactggaatactcaggtccaagtgatattcatatagagacccctgcatcttatggaggagggtgaagcccttgataactttgtgtatatgtgtatttgcatgtggatattctaatgaaagttccacaataatcatcaacttttcaaaaacaactagaagaggttgtagctcacatagttaaaggttcaagatttctaaaaatatttggcatttgaaattcctatcttcactgataacaattaactgtgaaaaagcagtgagaaaatgtccagcatttacatgtgagaatgttcaattaagctgagtattaaaatacatttttggtgacagagatcaattagcagattcttttacaatcttgaggatgagaaaacaatctagatgcaataataacagaaaacaataactgaacagtatttcaaataatcatgatagatcataacatgacatgtagttagcagatccaatttgaatgcaaacatagtcaaaccttcacagtgctcattgaaaattcagcttagaagtagttacattcaaaggcagacatgtgcataaagaaagggctatttaaaatgtattcatttaaaaggtagtgatcttgatcagttgatatttgtcatttacagaaatctctaaattgcctatagtaagaaacaaaaaattatttatgagaaataatgttaaatctctgactcctttgtgagtctgtcctctgcaatgtagtgaaaaatattatataaatggtattcaacaaccttttattcattaaaaacaagcaacttcatgcttcatcctagtcaatgatagttttaaccatctataaatacaattacctactacagagccatagagcataacatatagcaaaagagaagcttgtcatcactgatcagactgttacaacaatgtttctacatggcattcttacttgagctattttctttttcatgacatttcttttctcaaatttgagagccagtagtaacatgtctataatactgagactctcctgcacatataacttccccaatctttctgtgaggatgaactgaactaaaagatactaaagtcatgcttttaaacagcaaggcatgcacctatttaaaaaaaaaatcatggatttttgtgacacatgacaactaattgtcaactgactatgtggtagtgaaatttatcaaaaagattaatatatctgaacctataaagagaattcttatgattctcaaaacaaatagttgtattagttgagcatccataacaacaaacatttaccagattttaagagagttcagtgagagacctaccctttcaatgtgctcagtatacagaaggtgtgacccatgaatggcagtatagagtataatccatacctattaggtgagtgagatcaatgtctaatctctgcctgtacttgaagtccgggtccatgccactgcagtgcagcactatctgggaaacacactcctcaattattttataatactgtggcctaaaaggaggagagaaaatatttgagaatacttttctacttgtatcaatcaattttcttatgaagggatagagaatgctaaaagaacttagtttttctccagcaccaataagaaaataattccactaacatttgcacttccttagagaaaatatgattaaggcttaaagatggtctgaacattagggagccaaattgagtgtgatgtgatcgactgaaaatatgtactgacttaatatgctagtttgcagggactcatgcttgtgttcaaaaatacttatcaaccccatctatttatttaaggtattgtttctaaagttaatgaaaatgaataaccccctagtcctatatctatgagcacagaaatagctctagacagccacaagcactcattttcaaaaaaagatgagattcttggcattaggtggcaagcaatgtcttgaattcagtgaagaacatttactcaggacagtaacaccagtttataaaactggactgaggcatttctgttacacagtaatgcaaaaacctatgtatacaacatgcttcaaaaaacatctattttatgaagccatatacacttaataggcacagctatagcagtaatttgtgtgatttatcaaacgttttaaaaacacatcacacttccgtaatctcccaaggtaattctggccttaataatgattgctgactggaaaaggaaaaataaaagacattttgcttttaaattttgtgggagacaaattttcattggttaataaattcaacactattgtagaaaagtattaattcagacaaactacaatataaacaccactaaccatagcttgtcaacctactaaaaactctaaaccaatgaaaaagagattctaattacccttctgtgtatttaatcatgtggttgttcctaagactaagaataaaaagaaatacgtattgcatggctagggatttgaaaatcaccatcagatctggagatgaatagtattagtccttaacctcagtgtgatgagcactctttggataactaagaaaaacacaactcttctctttgagggggattttattaagtctacatatggaatgaaagcacatgttacacattnnnnnnnnnnnnnnnnnnnnnnnnnnnnnnnnnnnnnnnnnnnnnnnnntgtatgggctgaggagatagctcagtggatagaagcactagctgtgcaagtaggagggcctgagttcaaatgcctagaacctaagtaaaaaggcaggcatggatatgcacatctgtaactgtctggggtgttgctagaaggaccaaaggaatctgacagtagtcctccagtttcagtgagaaagacactgtctcaagataaattgaaagaaagtaacagagcacaacaaccaatttgacctctggcctctgtctgtggtcacggaaacaaaattacacaaatactgtatacatacatacatacaaacatagtacatacatacatacatacacacacacacacacacacacacacacacacacacacacagagagagagagagagagagagagagaacatactcatataacacaaaatttttaaggatgccatgtgtaaatgttttatcatttattagtatttattgagaataggtacttctggcaaatcttgttcctaggtaactgaataatcatgaatacataataaatacataataaaattatgtattttaatttatagtggtttttaaaaagcatgcattagtagtttcaacatgtttctgtctcctaaacatcatgatgtgatccaatcactgcagtagaatgaagaaaaaaatagctctatatgctattttagaattatcaatttttgttaacaatacaactagcattctaatatcacttctttttctattattcaagcaaattttgagaatccaaagaaactagtatgtaataattgcaaacatagaagagtgtaaagcaagtaagaggaccttgaactgtcattaacataagaccatggtcatgagcctataatttcagtcacccataagcctcttgctatatatgcttccagtttttagatatagaccttatcatctattctaaagtataactctatatgttatcatattttacaaaaagtaaaatatacacaatacttttctgaatttgaagatcacacatttactaaacactataaaaagaaatgataaaactttacttgttaaaataggaggatttaagacattctagcagtatcaagcagaaaaatttattacatattcaataatatacgacaggttaatttatacttacattctggttgcatgcacaccatagttatatgcagttatctttcctggcccaattaaaataaatgaattctttttttcaaatgttgcctcaagtagtaaaacacttatattttatgtacatataacatatatatttcctcagccctactaccttgttaacttccttttaatatccaattcaaattatacatgtagtcatctcacatatgaaccttacctgatataataatcatttctgatgagtagaaagtgctgcagaatggataataagtaactttcagctgcagtgtctttcagcatgttatagagaagatggtagacttcattcatatcggtagaaagaaagtaaaggaaaacatcaaagattcttaatggacagtgcatttatgactaaagcagcctaatttttaaattaaaaatttactacttagtttccattatggttaataaggtttcaatttcatgatacagcatttaaacatctacagaaaaaataataatcatccattatattatcaacttcaaataatagttaggaccattcaaatagcaaagctattggtgaaggaggctttgtcttgatctctctatgggtccaaaagagccagggctattctatttttatcctcagataaaagatatatcaagcaagtattcagctatcaaaagatcacaaacctagctttattttaaatacccaaataaaaagtctaaaatctgttgtgttcatacttgaccttctgaaaagtccatggacattaggacatttttttttctttgggatataaaaactagtggtgtagatgctggtagtagtctagaaaaaaacttcaagattggactcacattatatgtactgagtatattgaaagtccacataaaataaaggtaaaagacaagatgcaatccaacatcttgaaacaccatgaaatgggcagtagaattaaatatacaatgcactaatttaaacaccacatcagagttctgagttaaagtaacataaggacattgaatggctacaaaattatcaaataattgattatatcactaaatataaagcagtttattgattaaaaactgtttttattaattttgaattactttaatttttaattatttcctatgataataacatttctatacattgtatctacatttatgcaatattttcatgtaaagagaggagaagagtacataaaaacacataagtcaaataaagtaataagggagtttcaaatagggaaatattgttcaagtttgtttagaataccgaaagaagaaagataagaaaatattaaaggtagaaaagcacagctcagaggttactttggttcgcaagtgtcttcctacttcatagaatccaaaagtataaattttaatgggagggagataagttgcagaactgtgacaatcatatcttatgtctcaatttcacatcagacagttggcacaggaagattatatgctgttatatatgatgtaggtacttttatagcactactttcttatagaaagctcctattgtatctaacaattttgctatcattaaggaacacaaatacccgataagaaataagatactcatttccagaaaattgtatctataagtggagtagcatttaataaaaacaaaatatctcttaactggtatcacatatgaactcaaagaactttttctcattcttggaaatatatactgcttaaggctcttaggctcttgtttattcaagaccactgagcagagtgtatctctaatacactgagtaattaattgtgtggctttcaatagtctgaatacatcatcaaagcaaagtagcaattgtcagcacaaatgggtatcaaggatagcatcatggtggagcactaatataaataagcagttacaacattgttcatagaaaaaaaaactaatgaaatataaaaaatatcctcaagtcctgcttttaaacattaagtgtaaaaattaggtatttattttgtttgttaaaggatattccatttcagctcgaatgtcattgagacggtgggataattcagttagatcatcttctttgttctcttcaaacactttcagctgaatatcaagctcatcattctctttttctttaagaccctaatataacaataaaattcagaaaatgaatgacaatttaaaaataacacacctgctaatcaggggcagaataaaattactcatttgtacacagatgcaatttcaaatattgaccttgctttcctaaaagaaaataaatacagctaaagatttctatttcaaaatggaagaacctcataccattctttacattttctttccatgctctaaatcttgcaattcacattaaaaatattaacaatcacttctgcaacaacaacaacaacaacaaaaatcccactaatagctacaacccaattcaatgctgtcgttttgacggaacatactcatcagaaatcacaaaagaaaccatgcagttagaacattcacaggtgcctctggcaccgagaaaatgaagcaataaagatcagttgtgttaatgaaaaaccaatgcaaggatatattcaagcacaacagtcccaagtacggcctagaaaaattttgtaaacaaatttataatgaatgatattttgtgattttaaagttaaaaggtactaagtttttttttttttaaattcatgatatagctagctgccctgccaaactttgattttcatttagcctaattacaaaataccaacttggtcatcaaagatttgtttttgtaatacatcagaagcacatgcattacaaacctcttataattttccaaataataataatatgaaaattttggaaacatgccagactagagattgttgggcttaatagatatcaccaggaaaatcttttaatatttgtccattaagtttcagctttgaaaactcaaatcgataatcacaactgtggatgctcaagggtgataccaaaactgggattatgatgttcagagctgagcttgaactctgaaaggaaatgcaagcaaggtgtacttcaaattaggtaaagaaagaaaacaggatgcatttcttctttctatttttgtttctattttaattcaagaagaacaatgataaatagggatgtaatggcaattatggaagcaaaacacaaaacaaagcactttttgatgttctttctttgaatctccatacttaagaatgtaccaaattgttaacacatttaaatatataaaaataaaccctataaaacatttaaaatacattttaaatattttaagtacactcatataaagcatgtaacaaataaaattatttccactttgtttcttttaaactaagaactttttgatataaccagccactttcaagcagaagaggtttattagaatacaaaattatgtaatgtttatgggtcatattaccatatgagcacagaaggcagttgcaaccagaacacattcagaacatcaaaaaatacatttcagagcaagtaattctacttattctcctctttacaaagaaaatgtgttcaacactactgttttatcagtaccagatttataagtggacaacagatgtaaagcaaggataaccagattacaatccacaacctcagagaagctaggtaaaaaggggaaccctaagaaggacacaaatgggaggccccaggagggtaaactgggaggcagggtggaatggtggggatggattatgggaacattagggatcaagaataccaagttgggggaaggattgaaggggagagcaaagaaagagatatctttatagagggagccattatggggttagggagaaatctggtgctaaagaaattctcaggaatccacaaggatgaccccagctaaggactcctagaaatagtggtgatggtgtctgaaccagccttcctctttaatcagattggtaactaccttaattgtcatacaacctacatccagtaactgatggaaggagatgcaatgacacacagccaagcattgggctgatctcctggagcaaggggggggcaagaacaaaatggggaaatccagggatacagaagaccagtgctagtaggagctcatagactctgagctgacagctcctagagaacctacatggaaccaaagtaggccctctgggtgtgggtgacatttatgaatcctgatctattggtaagttttcatatcaaatatcaaactctgaaagatatatccatacattttcaataaaataaatgtttgacaacttaaacaaactttacacagtaaaaaaggaatatgacagatataacacagttatatcacacttaggcatatagtcaaaggattctaattcctactatggacttcataaagaattaaaactatttctcttttgaaaagatctgaagcagcctaataagaataccatatttaagcaaaatatcccaaatatactagtcaagcctcaatatgcatacttatgctgactataaataaaatcaatcaaaagtatcaaagaggaaagcaaatttgcaaatatatatgtatatataattcatatttatatacatcctattattagctgactgatgaatcatccattgtatagtgaaattattaacaaagtgcaggtttttttgaagcaataacaaaggacaaatttgtgctttccttgaaaaaaaagtacctttacttgaaagggaaaacaagttaaaagttcagtagtacaataaatagaaacattgaacttactgggagcatttcttttagtccagaacggaggaattcattcctcaaatgaattcgaaaatcaagatcatatggagaagtgacaagtgcatttatgaactgcatgcatgccacctaaaaagagaaagtaaatgccatttatatatttaggtacagtaaagaaatacttagctaatacatgcaggtaacagattcactaaaggcatatggaatgcaagtatttctgtaagtatattgataagacttcgtattataagcaacattagcaatcaagattatgatatccaacataattttaacaatatgaaagttaagtgtgtttgctttgctaaactatatgaaaggatattaactttcccaaagaaacttcaggttcccaaataatacacactgaaccctatgaaaagatcatgaaatgaattcttgtatctggtttccacagatagtaagggaactaatttctacatagctataaaaacatttccagctgggcggtggtggctcacgcctttaacccctcttgggaggcagaggcaggcacatctctgcgagtttgaggccagcctggtctacaaagctacacagagaaaccctgtctcgggaaaacaattaaaaaaaattccagtataaatcaaaaattttgtgaagctatattagataactttgagatatcactgtattagcttgtattctttccatggaagtacgttaaactgatgtaagtggtgttcttctgtaagagtttaaaaattagaaaagaaaccactagatggaaaccaaacaatagagagtacatgaaccagtttattacagggtgggagagcaagagcgtgggggtggggaggcagtaagagagacagaacgagtgagagagcaaagagagagaggaaggcaagagcatagcagaacagagaataattagcggttgaccactggaaacagagagagagaggagggataagggtgcaggctcaaaatgggaagcgtgcgcatgtgcagactccctccctacacagtcctgtaatgtgtgatgtagccatgacgtggcaacgcaacaaagggcacttcgagctgcctaggtatctgcctgaacctttcatttccacctttacttattattaaaaaggtggggagttaaacatggccagatagggaaaannnnnnnnnnnnnnnnnnnnnnnnnnnnnnnnnnnnnnnnnnnnnnnnnaacctgggagtattgactatcttgggggacctgagagaactggggtgctgccatgtcctggtgtagctggttgtttatatgagcagaagagtagagtacaaggaaactcaaggaaaatactaaattttacaaaaattataagcatatatagaaagatgaataaaccaaaaatgttgaaaacaaactttgatagaaatattgcatatgttgacttcaacacaccttgcattacatatcatttttcaaaacaatgagaaaacattaaaacatatattgcattaagtttgtatcaaaatgttatacactcagcttattgttcaaatgtaatataccaaattcaaatgttttttttttgtttgttcatttaaaatagaaagctgagcttgttaacaaagttaccacatagagaaaaagtaattgaacactgcattccaattcataggaatgctcaggtattcctagaataaacatttggacaactaaatgtgtatcaaaaaactttgcatcaccttaaaactaatactggatgtgttgttaggcattttcattctaattgattacaggcccctcctttatacaataagaacctgaataaatctttatagagtctcaataggctagtatatgtgtttatatattgtatgcagtgctatattattttcttgaatgagtcttgttaagtaacaattatgacatgacttaacaagacaaagcccaattgaaaattaatagaaatgtttacatatgctagtattctttttgccagaaggaattctagcttaataatgtatattttaataccttacaaataaagactatattctcataagaaataggttagtaaatcttgtaacaatatctttatagaaatagaagtattgtactaatgaaataaaatagtaaaaattaaaattactaactacagcaacatgatatcatatatcattataaagatatcactgctatgaagtactttacagataatgtatacaaacatggctggatattttaaaaaaaggtgaacatagagtctaccatataaaataagtaggatatgactgaaagacagtagtcaaaaaagaataggtaacaaaatgccaattatggctcaccaaattctacaagatctctcattaataacatgccaactgcaaaattaaaactcctagggaattacatttaaacacacacttactagtaaggtaagaaaaaaactgttatttgtcctcatctatgctacagttattctttcagagaacaataacttaggaattaaaaactaaaattatcaaaatatcttacatgaaaatttaaataatatttcaagaagcacaacaatttattatgaaatatcattgtgtggatccaatatacaaaatacaaatagctgaatgcaaaaatctacactcttatctctattgtataatttttataaatttttagacaatgtattaggtgcttaatataatgtactatctaaagtcactctcatagaaaacaatgagatgtaaattacaactatatttctttcacacatggaaaagttgaagcttacagaagataaatgacttatgcaaggtcaaatagcaaaagaaaattatatttctaagttacactattttatgtcaagtagaaaacaattccagaatgtttcagatatcttagaaactccacacaaagattaatacaagaaaaattttaaggttgtataaggtgacaaaacgtatctgtagcatcatgtttggtgaattagaacatctacattacagctatccataattataaaagcatggaaataatgtaacaatatgttgtctagaacaagaagttaccaaatatataaaggagttaccaaatacataatgaaacacaaataaaaataggtaaggacgaactgatccttggtttggagtacatgtcattccatatacatctcataaagtatcatattgagagcatcccatagtcaaattattttctcctcttnnnnnnnnnnnnnnnnnntttgctctcccccaaggagttccatattacatgagaatgtgcattcaaatacaagtacatgtatattacagaactctactattcaaaccaggctcttttaaccacagattaacttcaataggaactaaatcaagaacttgacttgactagctatagtccaatggcatgaaaaatacatgtgatttataggtcccacattggacaatatgaataaaaaatactgcagaaaatttgacagaacagaactccatggggaacattaaggaagatggggttctggcctgttagagctcagactgaaatgactacaaacctcattcccaaataccaaaactttgatgctcagcacccaaggatataaatctttaaacatgtgactgaactctattgtcctcttagagagcaaaatcaaactgattttaaaataatccctctccaaagaaaagaagtaaacaacctaatattgtttcatatgtgggttacaaacatgaagtgatctccctcaactgaaaacgctaataagccaaaaagaggaaactagcaccacttattgtagtactgcagtcttctacacattacaatgtgccaatctagcattgctgaatacaatttaacttcaacctcttaccagaaagaatacaaatgtacttgaattgaatagcacaaattccaataaccagattcttctgtttttaagaatttttttaagggctttaactttcaatgtggtttttccattttttatttgtgcttctaatatagagtcaatgaaaaaatagtgtttaaaaatatcacaggaagtcagtaaattttgctcattgaataaaaatatgcactggtaggaccataattcttatgctaaacaagtaagtacaacagtgcctgttcttattaaattgtttttaacataggaaaatttgatgttatctgtattttattcatatgcatttaataaacatcccatgtactagatatgtatacatgctcttataagtgcatataaaatacatgaataaaattaaaatatacaggaatgtcttcacaaaataactacgaaaataagagaagcttttatttcaactaacaagtttcagaaagtgcaaaaaattgtctgcctgtttgatcacaattcttagagttatggagtacagtaattgccaactctagggcattctcagacagattatccatattgccattagctgtgacaaattgcgcttttaaaattttattgacactgtcacacatttgaccttattaagtgctctgctgacattaacaaggtctttctttatcctagccacagcaggagttgggggaaaaagattgtttaagtcaaaataagtacttactaagaactattcaaatgtacagtgcaagttaattaagtcaagaaatggagaagaatgtctagacaaaagaaggatttatgtacaaaggattagaagtagagagaggaaattgcacaaaatgttcatgaaggagagcgtagtatgactccatcaaaaagtgtatacagaagactagtgaaacacacaattagaaatctgtaagcaggtggtgacgtgcttttatctattcgtttgggaaggagggacacaaagactagattttaatcctagaagtcataaaaagcctttgaagaattgtaagtagtgatgtgccaaaatggcatgtcagaagagtgactttgccggagagtatttaaagggttagaatgaagggtagaagatttaataaaaagaagtcagcacaaagactaaaataaagagaattccctgaaatttaaaagaaaaaataactactggcagcagcatagcgattagagagatactgtgccttgaaagaagtacaaaattaacatacaatccagtatgtactgtctgaaggaatgcaagacatatagtactatatatatatattacaggtggatttgaagccaactattacatttttggtgtatgttaattcttgcataatgatcaggaaggaaggaatataagaaaatggtaggtcgtggtgagaaaagacattagagaggttcaggatgtataacttgaagatgaacatagttaaatgtaatgcagaacttgaacattctatgtttgaaagggagaatggactgggatgcaaagagcataggcaaacatgtatctcgctgaactcagaaagatggataagacagtgggcaaatcatcaaaatgagaaaaatgaagaaccaaaggtcccaagatacaactttgtctcgtatgcacaaacctttggtttgaattttcacaggtgtatatggggtcatagatcctaaaatcagaaagggatccatgagaggtttggaaaaagttatcctaagagggaggttcgtgaatatttttgacatgaaaatgaaatggcagatactggcagaagaagaaggagatgagcacagaaaagaagcattgcgaaagcacagaggagccgaaaaggacgggcacaagttaagtatgtgtagtcctgctcaataatgccaaatagtgctagaaagacaatgtgatagctttgaaagtagtctgctccttttcaaacgcttagaatcactcttacctactactgtaataatatacacaattattcatcatctttgaaacagatttaaaagtgaaggtatacttgaagtcagaatttttcttgttacaatgaaaaggtaacactattgtccaaatttgtctacacaatggtacactactatgtatgtatatatgtatgtatgtatgtatgtatgtatgtatgtatgtgtgcatgtgtatgtgtatgcgtatatgtacgtgtatatgtacgtgtatatgtacatacatacatacatacatacatacatacatacatacatacatatgcacacacacaaatatacatgcatacggaagtagtataaacttggaactcagctcattggcagttaccttagtttcagaagtttactaaacatctacttagctctcccttcctgcacatcttccaacttgtgcccttagtctgccatgaacagaaatcagatgctcagtctcaatatgataatgcaagaaaacaaacttaggttctgattaaaggctgccaggtctttcttttcatgaaaccggtttgatagacttgatgatttcaatgaaggatcaatgtttgatttttaccttcatttcattattggttctaatttatatgccaagaggatgcctatacaatgtaaatgtagtatacctgagagaagctatcacacattatgaacaatacattgtgtgaaatgcttttgtgtactatattcaattattataccagaagactttctccattattctgatatactagaaagcagtttaatgtctaccataccatgctaccacatttgtctccacaacttctgaaattctgcaaacacatgaaagatttctgcctaactgtagcctgagaaaatggatgagtttaacatgcattcactggatgttaatgttaccttctctacctataaaagactactaatggttagcttactttgaaatttcctgtcttgctacacagaaataaagttcaagcggatgtctgtatggtcttctgctttcatttctaaaattacaaagactatggaggtctccattttcacgcactataagcccttcttgcaccattcaaatttattatggcttctttattagaaaacataatatcattgaaattcttatctttgaaagccaactcaaatatcacctcatgagatacttctataattctcagatttgctgtgtaatttaaatgagattacatatgtaaattgcaatgttattgtggaatagcactcacaagtgatatttttaatttgttacttgtgggagtctgataaaaaacatgaatatacatgaatatttatgagcacatacacatgttggcacatatacacataacaacatataagtaggtgcatataaaatgattattggtagaaagtagtgattaaaaaatagtggaaatattcttgtgaagaagagcaaaaatgcattagaaacagaataaatgggtattcagacaccacccaaaaagagtggtgcccagagaagcaagagaagtaaaattgtcaaatggtcagtggacaaagccaccattgggaagaaatcattggttttgaaattatgagaccattaaagatttctttttaagacagtgacaaagataagttgtgaaagataatttagaaaatagaggaaagaagtatagattgttctctgagagacaagtgctacaaggtaaaaaggcagatgagaggctagcaagtgtaaaactgcaggtgacacagcatggcagactgaatagtgcaactaagctgaacgtaaggcaatgaagagagtacatatgttgatgtaatttatccctgatctgttcctgaaactactgaaagtaatgaaaatcctatcatagctgagctagaaaacatctgtaagaaactgttgctttaaaatataattagttcagtattttaaaagaattacttcatgatattctaataagagatctcaggacactaccaaaattgaaaagtaattctgcaaaaaaaaaaaaaaaacacaaattacattttttaaacaacagagctcagcttttgtttttaatttcagtattctgaacacattttagaacttttacagaatattttctcattcacattaaatatgcctaataaacccacttcacaattcttgggagagtactaggctctgtatataataaattactaaacgttgtagctcattaaattaggaaatttcaaattgtagtttgcatatgtttgcatccataatcagtattcaacaatttcttgaatatttagcaagatgtctgcaatttctccatatggtacttgttaaacagttgcgacttaatcattctattctgtacagcaccatgaaagccacagaatgtcagtaaagtttcactgactggggcaaactactctacaatgaaaacatcgcttttttatggaggtgttactataatggacatacaatataattcgggatgtatatatcaaaaatttaagttcaaaccaccattctaaaccttaacagctttgtgattcttagagaactaatcatgaagccttcgtgcaactcagttccctgatcagtaaacttaaggtaatatataacacagaattgtggctgaaatttcatttaaatatttttaactattcaaatctatttgtgccacatatggcaaaccgttgcaaatgcaatgaaaactttgaatctaaataacaagcttgagtcatgctaaattttgaaaataacatacaggcgtatatgtatgtctggcagtgaaagccatctaggcaagcaagcacagccaacacagcaacacggacaaaacactggagaagacatctgaaaatgcatatctcaggctttccctagaaagtatgaaattttagtgaaactaaaactaataatatggaaaactgtgtcacagataggaaaacactaaggggacattctcaattttaaaaacaccaatgcaaaagagaatacaacagaagtttatcaatatactcatcatcgttgaagtagaacaattttcaaagatatttttacatttctaaagaaacattatgtacagtttcacagtactacagattctccttggagtggccaattcagctgccgaacacagtttccagctgtgacagaaaagatgccaatacttcataaaacaataaaaaaaaaaatcgattgtttgtttcacatcaagtagaatatttccatatgtatactcacaaaaataacttgaaaaaataaacatagtagcaaaatctctttgagtgatgatataactttttaaaagatacttcgtggagcatcaaatggtatatacactatctaaaacaaagagcatgttgacatcaaattctggttcttccacaccatgtccacttatacaagtgatgcaatctcattctacctatccacatgataaatggataatacttagggagctgattcattacaagaattataccaaattatattcacaaaataaaatgtgccattcagcagctcttatctgtaaatacaggcaataaacatgacttctcatccctcaagaacaatgtatcctttcataaagtaagacatttcctgaaatcatgaaaaacaaaagattttttcagttttagaactaagcatgtttagactgggtctacagagttttcacagggtgcctgacacgggatacaattcagtccctctgcattagtgagtctgatttctgattgtctgaaaggcacaaagagaagtatactgaattctctttctttaaattgtttttttggttgattgaaacccaggcaagtcagaaccttgtaaccctcctgactcagacttcaaactgctaaagagtaccatactatgacaccatacctaactattttcttacatttctacaaaagcctatagctttattaattggtcaaatactacagacctaactgtatgtcctttggcccatattactgctaaagcttcaacttcccgacaattataataacatatgccgtattagtgacaataaaaaagcaattttcttaattttaaatgactttaaatgaacaaaactatgagtaacacaaataattgtacttttacattccatcccataaatgccagctaaaaatgaattggtataatacaggtcctcgaaatataactcttcaagtgatttatgataaaacaaccccacctggagttgtaaggcttcatgattttccaatccttccacaattggtgaaaatcgttctctgttatttctttcagctgcagcactgatggcccctaaaagtttgtctagactacagacaaaacaagagaaaaaggaaatgaggaatatttcatatgatgaacatagctcattctctattttattcttagtgtttgatgtttatatagaccattaaatgtttcacatcacaatacttttaatagacaaaaccttcaaatatttttagtatataatacaatgtttttaaaaatattcctgctatggaacagctaactggagctaattaatatacatattactatcatatgctaatgttttatgagctgtttttgtttgtgttccaaacatttacctacaaacttacactatgttttctttttattggataagttcatttaatgttaagttaccatataagataaagtaaaatacaaggatacaatagtacaaaggatatacctgtttcaattaaagatgcctgaacacacatgtgcatatgtgcacgcgtgtgtgtgtgtgtgtgtgtgtgtgtgtgtgtgtgtgtgtgtgtgtgtgtgtgtttcctatgtgttctcaaaacgttttcaacttaatccatttccacttaactgatgttatcttcagtgagacaaaattccagttgaataaatgaatattttaaattcatctttaacaaattcagattatataatatccaaaaaggtaaaatacaaacaaaataaggatatcaaccaaaaatattctaagaactactgtgtttctgcaagttatcaaaaagaagaaccattaatttctgccatgtcattttgcaacacaataaacagaacctgtcgatacttacatgttgtcttccgcaacaatgcaaatagcagacagtatttttactatttcagtcatcatgttgggctgtttggggtcaattgctcttgccaacaataaaaggctcctctcatctcctagaatcctttgcagtccaaactaaaaacaaacacaatgggaatgtctatggaacatatttttcattccaaataaacccaaaataaagaaatgtttcaaaaaaaataccttcacagtgcccttaggtatctaatgatttggattttcctcaaatgcaatcattcattgttttattttatttgaaatggctacatcttagaaatttgagggcatgaataaaaatgatttccaatattcctcaattacatttttgaaaatatataggagaaatgtgggaacaactggtatttgtctaacaagcaagaacatatagaacatacactgcctatattttctaaagctacttttaatgtcttgatatccttgggaatgtctagaatttgtggttaattttttccaatatatttgcactgaaatttaaagtaaacacgggagggaaaaatgcttaagtgcttcaagtatagtatatagtcgataaagtactaaaaatatgatatgggttttccccgatttccttgtccttttatatcatatctcttagctagcaacacatattatagactcagagacataccccagtcagacaggcaaagaaaatattagtctcactcattttctaggcataaacctaagtgtataagcacatgccatacaaatgccaataggtaggttttcaaatccaaaattaatggtaagatgctactattttcacctttgtctcacaaagtatatttctgttttctcagtaaaagtttgcttcttttttctctcccttttttatttaaattagaaacaagattattttacatgtcaatcccagttccctctgcctccccccaaacgaacacattgcctatcccataccccttctgctctgcagggaggtttaggccttccatagggggttttcagagtctatcatgtcctttgggatagggcctaggtccaccccaatgagtctaggctcagggagtatccctccatgtgggatggactcccaaagtctattcctatgctagggataagtactgatctactacaacaaccccatagatttctgtgatctccactgacacctgtgttcatggggtctggatcagtcccatgctggtttcccagctatcagtctggggaccaagagctcccccttgtttaggtcagctgtttctgtgggttacaccagcctggtcttgatccctttgctcatcactcctctgcaactggattccagttcagttcggtgtttagctgtgggtgtaaaattcatttatatttttcttgtagtaaaacataattctaatattgttcttgggaaatgtatataaaatgaattagattttatataaaatttgtgacatctttattgatattttaattaaaattcttaattgcttttttcatgtttcacccagaaacacccacaaattcctcatccatgtgaacatgctgtgtatcatactatcatagtttttaatgatgtagtttatctgtacttggtttgtaatgtgagtgcatatgttttcttaaaattgtccatttattcagtacttataatcaatatgctatactataagcagttaagaatctgaaaaaaattgcttcatttcaagttagttccatggcaacattacatttcattgggaaacattatatgataacatttggcaaagtaccaaacataggaacagcatgaaggttcttaattaaattctaagagaaaagaggagcaggctaaactttttaaataagactttactgtgggctttaacacataaggcaacatgcaaatgtttatgagtttctgacataactaacctcaacgtcaagtgtcatttatgtcatttcagatgaaatttaccctcctcgatttggaaaatgtattccaacttaaagtgaatatatcactgtgtgctttctattcagaatgtctgttttatgcattgtttcatatgactatcatttaaaggacttgtttattcatgtgacaaggatatatatctaaatcataaaaatagcttcacaaaaactccaatttcgtttcgaataacttaaatgaaatcatcatgttcttcaaaactgccaaaaacacataagaaaaagaaagtgagtcttgccatatctgagtatctcctatgggaatagggctataaaggaagtcctacaaactaatataacatactttagtcagtattctaattataattagttgttatcctacaaaactatgttagttgacaacatgaatcaataaaaatgtagcacaaaagctcccattgctgaatttacagaggaggagactgattggccaggggctatgtcatttttcaaaggccccgtctgcttaggactggaaatgtgatgtgcatctctgatctccagtactgccctctctttttgtaatgttacaacttttttcagttgcagaaagagatgcttcttgagctctggagaaagcaatgttcaattaagcgtattgttattagtcattggatgccatgacgtgttgtatctaaaggtgaaaagcacagaagaagagaagttctcgaccagtactgataggagtgtttctacaagaaacatacagatgggtaagcaaggtagctcctgggataaaggtacttgataaaacgtctgaaaattaaagttggatccctgggacccacatggtagaaggagagaggtgaaaccctcaatttgtactttggacttcacatgtatgtattggtgcattatgcatatccataattaaatgtaaaatgataataaacttatagaaatagcagtaaaagtatatgtgatgaaagagttcattagcaaccatgtactgcatgtaccaataataccatttgctgagtaatatgggcatatgatacagaaagtgatatataattgcatataccaaagaacgtgtttgtatattatgtaaatatacagtattactgcattgattattaatagctatcactcacatttagcaagttcctggttattgctataattatttatttctattaagtaattgtttttattaaaatatcaactaaatgtaattaatgtgattaagcatattagtcagttatttaatctgtaagactccacaatattatatattaaaaatagtattgtatgtatacaaaaatgcaagctatctcccacagatttcttttacacatgttaaatcactgaaactgaaatgacacccttatcaaactatttgaaccctattcctacccttgaattttccttttaaataaaatacaacttctttctttgtatggaaatgatattcaatttatgaaatgtaaatttacatactgctagggtttaagagatgcttcagtagttgagagtacctaatcctatagagaatccagattcgattctcagcacccacattaggcagctcaagcctgtagctggagtactaggggatctgattccttctatcctgaatgggcacctgtaggcatgtcctgcacatcaactcatctagcaacatgcataaataaataaagcttaaaaaatgagacttcattatatcacaaaaggaaatatgtgtcaacaaatttgaaagctaaactaatattcttgtcataaatgcaaaatatggcagtaaatattgcgggaagcaaaatacacctttgaaaccacttataggaaactcatgatgatctacaccataaacatattattaaaacttgaatagtacccactgttttatctctttcttacttccatactgtcgagcaagctctctccttttgtaacagagggataagtaaacaccatttaccttattattcataaacgctttcaggcactgaatgagtttgtattgattcttcttgtcaatattttcttgcctaagtcagtaagaaaaaagaaaaaaatattacattgtacgtaaatttttcccatgtgtgaaaagtttttttgtgaaagttttttaaaacttcattcttactgttttttgtctagaagcttttccagagcatccagtaagagtccaagtccttcatggccaaagttgttaacccagctatgagtggaaaagaatatataagtaacttcacaggtttaacagtaagatattaaaatgaaaatttcttttcaaatatgataatcctgccttattattattatctttatcatctgataaaaggcttgatgctgagaataaccctgatatcatcatctgaaactcagacctctcttcatagtttccttacccctatattgcacaattttagatagtacagcttcacatatttaagccacaatttatgaggtaaattcatcttccattatttctactccctcaaatcaactcttcctccactctacagtattctctcagtaacaccattgccctttgattccctcaaacctgaaatactggctaaattgtttgacctgccattgtccttcaccttttcatttattctgctcatttcataaacagccgttgagcatttacaaggtaccaagtatgtatgtaatacagatataatgagcaacataactaagcccttatcctcctagagtctactacctacaaataaagagataataaataattaaccaattatataaacatcagtgctttattgcaatgaagtaaaataaacttagctaaacaagtaaaatgccaggatgcttttatttaatatgtagcctgggaaagatctttgaaagattctacctaaaaggaaaactgaagataaataggattatatgagtacaaagattatcagattctagagattttaaatactatgttttgaatattccacaacatccgtaggaagaaatggattagtgggactgggaaaatagcacaagattaaatcccagttgtgttagaatactagctcattgcttatccaatcatgaatactttcttcttcttcttcttcttcttcttcttcttcttcttcttcttcttcttcttcttcttcttcttcttcttcttcttcttcttcttcttctttaaggcttcctctaaatgcccctatgtccttttcattgtttacattaaaacctaatttactcctggttaactttatcttatggctgaagaaaccaatggggttctgtgtagcttcgtttttttaagatgttttgttttgttttgttttgttttttgcttttgttcattttacatttaaaatatctgactgataacatttagtcatattcctcagtcctaaaatgcacttggattacctcaatatctactcagcctaacagtttcatcaagtctcgatctacctttccagactgagaatttataccacattggccaaataatcagacaaatgatcattactggagttctctctgaacctctttgttagcttatttatcctatcttcaaggaaggaaaccacaatattatatgtcaaagcctccaagcatcaaacaaacattttaaatcattaactatctctccagcccttggaaatcgtcaaccaaatatgggttcttctttaaaacacctacatataatcttatctcttgatgtatgacatggtttttgtcacatacattacagattcacttagattataaattccctaaagagagtgtctttacttagtcatttctctatcatcattgcccccattagagtagcttacatacgctatatgacatatttgtaatcaataaatattaattttagtttagtatcttaagtaaccacagataggcaatctgatattgcccaaggatttcacaaaacaaaatatatacacagatgcttatgaaatagccattaaaattgctactaactacatatatacacaaattttacaacactggagagaacataccaggcttcatacatgctagacaaacactgtaccattgcagtatatgtactaccgagatactccatatattgaaactatgtgtatatttacatttcatagtctaaattttctctggaggttaatgagaataccctcataggctcatatatttgaatactttggtccttaattggcagaactgtttgagaagaatgaggagatgtggcgtgttggatgagggctgtcacagtgggataggctttggggtctcaaaagatcatggcattcccagttacctctctctgattaatgttctagaccaagttgtaagctcccagctactgctccagcaccatgactgtcagactgtcacctttatccctggcatggtgggtatggattctaaccctctgaaaatgtaagccccccaagtaaccttgttcttccataagttgccttcatcatggtatattatcacagtaatcaaaaagtaacttatgatactgcctgtctatctctcatctaagaggcatatatcagcatggttaagaatctatatttctaccagattaccagggagagcaatcagattactgaagaaggtataatttaaaatagctgagattcagaaccagtcatccgcaatatatatggaagctcattttaaactaatgtggctttaattttcataatggaaagaagaaatcaacgtggcattgtaatgataactggcaatgagctaccattcaattgaggcatgtaatcatccattgcaatgagctattttctctaaagactctgaataatcagtggagtagtggcagagagatagagacatcagtcctaagtataacacgctgtatttcatctatcagagagaaatcttcaaaaatcatcatagaacaataactttaacatagtctaaacaaatctacatatacagcttccagtatctcccatgacatttgagaaaaggaaatcaaaaatttattcaaatttaacacttcaaaaatagttttcaaaatgctaaatattactcatattttctttatacccagtactattaaaattattaggattgtttctttcttcctctaggaaattatttgatagaagagaatgatttatatttgttcatttgaaatcagccacccacacatcccagacttcaaaatgcactgttaaaagcattttggattcactcagtgaaaattatttttattccaataaaagatacaattatgaaacgtaagagaggacaagtttatttcttacaattgatggagtacaaagtctcaactgaagaatcatctggccaatgggaagaagaagcctaagcagaatgctcagagttcttgcagtagaaatggcccccaagagtagtttgctgatagggggatgaactaactatgatgtaccctgatgatacataggaactaagtaagtattctcctgcccccatttttaccaacaccatttctgtcttgcaggcattaagcactgtgtagcctctagctaaaatctctctgtgcattcattgtggtaggtaggcacacatatccaacaaaaacacataaagacaaaaaagacagaaagaaacagtttaacttaattaaaacaaaatgttggcttgtacacatggctgggcagggtttcttgctgttgtttttttgttttgttttgttttgttttgtttttactataacaacaaaagtaagagttgctgaaattatgtaccccaaaccagcagaatcaacatcacggtgaatgtgctaacacttcaaattatggagccccagctcaagagttatgggatcagtccctaggggtggtgagatagcagcaacgtatttttttaatgtaattaaaagtgatcttactgcttggtcaatttcacaaccagtggcataggaaaggtttgttaagaagtagaggaaccctttttggaaacaagacacaggctcagaactctagactgctatatacatcactcccaaccacaaacactctcactaccagagcacacagaaccagtacagaaatccagatgaatcacataaggctgacaagttttacaaaatgcataaattgcagctcttaaagaataccaattggggcatgcagaatcacaagaatacagttgatgattacattaaaatctgactcaggtattattacacttttagacataaatgttcccatgttgtctcaaccagaatatatgaatttctgatttactatggatgataaattgtgagagatatagacaataacgctggaaaaaagaatgatgattaatattctgtatttaaattcaatagccatctagaaacagattttttcttccctttttcctgagacacaatttacatgagtgtaccataacgtgccacataccacacaataggaccagtaccaagatctcatggaagaattcaggattgctgcaactacattgagtttgtatctatgaacataatataaatgcattcattactcacagtctagttcataagtttctgtaggatattttacagttcatgttattgatttttaatatcctaactgtcgtaagaaatcaaagaaacagatccagagtctaaagaaacagatccagagtctaactgaaatttttacaaaaaattcaggcaaggtattttatcagcaagaatgggagacaaaaaagagtaaagaaaaagaacatgtatgttaaagaaattggagtatattattattatgttattattattattattattattattattattatgtttgcaaataggagacattcaaattaggaggtctcttggcaagctacaagacacacatccaagccgctgcttgtgaaacttcccaaaggacacaatagaactaaataaagacaagagaagcccatgcaggatgtttaatctgcaagtaatcaagaaggtagaattagagatgaaaaagaagccaggaaatacattattttctttgtttttgtttatttgtctatgttattgtttgtggggttgttttgttgtttgagacagggtctctctatgttaacttggctgtcctggaattcactgtatagaacaagcttgccttaaactaagtacgattctcctgttactgcctcccaggtgctggtagcactgagacattactctaaccatatgtataaaaagtggcagtaggtattaaacagtggaaaatctggtatgctactgaagaagttaaaatttaaagaccatttccaaagtttattggacaattaagaaaacattccaccatccatcaatgggctatactctgtgagcccacacagtgataactgagcccacacagtataaatgcctattttttataggagaatatatacagattctaattctatgtattatatcccttctgtatacgtatatgcatgcatgagtttcatgtatgtgtatatttttgtattctggaaatcttcattcatcctgctttcgactgttaagtattgggattagccaccagcactaccaacacaggttgaaattggtttttcatgttcatttaatgcaggattgagaacagtgcctgaatggaatggaaaatataaataagatagcaagatcaagttaatatttattttctatcgtattacaaagcaaatccctgaatgtacaaagtatagtattagttttaggccaaagtatattattaggcataaaagatttcaaaaatattaatataacttttcatcatttaatgaaaagtaattctgcaaaatatgtagaaaactagcccatactatacatcacctgttgattatttcaaaacaaagatgtcaaaattaaatatttggagctcacattacattactagctatgatattgttcaaaactttgtatacatttccttctgacaatacctactgctaccgattcacaccgtaaagccatggaaattatactggtgtgtgtctgcgtgactggggtgggagttataattcatgcacaaacttgaatttatgttattgccattgctcttgtctatccttcagaacttgatggcaaatgtgtactgctgaagacaaagcattcatgactcatagaacatcgagaaatcaaaactggtattgatccagaagtttcatcactactggctagctatcataatcctagaaggtgctatacacactacggaaggagaaaatcaatcaagaatcttgtttggctatgagctagatatacaggcctggcaaggaatgtctactagtacaaaagtaccataaatgtcactatctgattggatctgaggcccactccacaatatggatcccataattggcaccattatcagtatcaagaacctgtggctagacaagttcataggccctagaggagaacttctattactctgcttaatggacttagtattaaaccaactccaagtgacactgttatacacatagataaatacacatctcaaatttcatcatattagtttcttttcgcagtaggtgattaacatgtagaagtacaactcatcaaagggcagagaataagagatagtggtgtgctcatctgtatctggaaagactgtaagagccagacgcagtttatgattacaatcaaagggtgtttctatacacagtaaagcaaatacatatatgaactcacagcagctatcacagtacacacaggaactgttcaagctaaacatcatcaaattcccagcatggagtggtggatgggagcctgaagttccattcctaagccagggcctattgataattgatatacgactagaaaaggacagttatttgtgtgtgtttgtattaagggtatagttcctggtatgtgaactgtactctaatgaatggccatatacccaagagtatatacgcagcataaactagactcaatgatttaaataaaaaaaatgaaggaatatagttgggtgtgtatggaaaggaaagtagatctggaagtagtcggggtgaatataaacaatgcacaaattcttaaaaattaataaaatattattttttaaataaaatgtattaagagtttaaaagtgggaatggctcacttatactgatcaacatgatcaatgatcaaaggaaaaaaaaactttacattgaatggaagtataaaagaatccatttaacactaattctaagaggaagtgagactctcccacatctagttctccagggcaaaacaaaatgaggaaaaactttctctaaacgtagttattctattaaaagaatttaaattttgttctcttccagatctacataaagaacaatctttcacaaaacttcaatattttatcaagaattagatatttatgctcagtattagctcattgcatttctggcaaatataaccttaatatttggtggagaaaggagtctattatacacatgcataaatataaaaggacacagtgattatacgttcaatttgataagattctctagatttatagcaacctttcaaaggagttaaagctaaaattagaaagttctacactaagtcccttaagttgtaaaagcaattggtctcatgtgaaggagagcaatattagtcatgtcatccctttatcactgtttgtgcagtgctaaaggctagtagagacagtattgtgttttgtgcaaaagatttgatttctctctaatggtgctctaatcccatgtggaatccgatactacagcccaaatcactggaacaacaaataaaatgattgatacttctaagtttcttggggaatcagaaaatgggtaaaaaaatataacacatgaaacaattaattcaagtagtttaagatacttagaacaatattgtaaatgttgtctttctaattttgagacaaaaccatcatattttaatacaatgtccctgatgtaatgttcattaatgcaattataacaaaatttaggttatatgtacttggataaagagaatgagatccacatgaataagtaagaccactgtataacctaacaaaacaatattgtatatttacttcatggatcagtaactccaaaaagtaatgaaggtaaatgtcattgtttaaccacctttaaaggatgttttcttgaaggaaatcaattttataattgtcactctttcaatatatacatccatcaaaaagcagatgttaaaataaaaaagaatacaatagcaacgtgcatatgctttacctgggtttaattaaaataaagacaattgtatccattcattttgtctacatgaaagtaaatacattagaactaggcatttgaattccttgaaatgattcactttcatagataaatgcatgaactatttctgaccaattataatatacctatttgatgcaatgctgccatttccaggcatttgtgcataagctttgaagcatgacacttgctgaccgcttatttctcctgattcacaaaaaggttgaatgtgttaattttccagctttgcctctcagaggcttttcttgaatgctgtgatagattacaatttccttagaaattcccaaagaagacatccaatcgttctctctggctgcatttattctctccatcagtctcactgacaagatcctgctatgtcctatgtgattcacacccttttaagaggagaaaatgttcaccttttcaggttgattacattatataaaaacaaatttctctttcatactgttataacaaaatactgcaatacctcaagtcgcatgcaatagtcttcttaaagaacaaaactaactgcaaattttctctcagagaacagttccctattattaaaatcaatttcttagtctgcctgaattactttggagatagtctaggaaatagctttaactgtatctattttaaatatcaacaggctaggcagtgaagattattttcccctgcatctgcctttaaaagttataaaagtataatacaaagttgtatcctgtagcaataatggcgtaaattatttcaagtgtgaatgaaaatgaaaatagacttctcaatctatagtaaatagagaaaaagcaagagtaaagaacatttcccatattcaagccaaaaccagtcatattttacatcttgatatgtttgcaattgtgactataattatgttagaaaacttactaaatctgatggcttactgatctaaccattcaaatttacaataaaatgttagcttccacaagaaaaaaatgtattggtttattttccaaagctaagtaatatagctaaaattctatcatgtactccacaggacatccaatttctgttggttccattgaattttgttaaaatgaatttattccaagaaagcacattcctaatctgcaaatcctgaaaatgaaaaagggttgacagagtttatctgtcataaataaagtaagtccttgactgcaatcaggaaaaacaatggcattagcacaaaacactggctcacatccccttttttctaacccagtttgtatattatgctttctgattctgctgggaagtaaacaagtggtaaatgaattctcctgcagtataagaaaagaagggcaaggaaagctgaaggacaattgctctttgatgagtacgaaacagaaatgcaacctttcttctcacctaccaggtacaatgtgaaaaacatgtaattaacgtctcattatacatggtgattgctatgtagacaaagatcaaacaaatttaatgttcacggatatttttagcacaggatattacacatatgtcggaaaggaacaatttctttggatgttgtttactaagagcatgaaatttaaagatagaaacttttgtcttttctgtattaatctttatattttatattaaatatatctatataaaactaagaaataaactgtggcgaatannnnnnnnnnnnnnnnnnnnnnnnnnnnnnnnnnnnnnnnnnnnnnnnnnnnnnnnnnnnnnnnnnnnnnnnnnnnnnnnnnnnnnnnnnnnnnnnnnnnnnnnnnnnnnnnnnnnnnnnnnnnnnnnnnnnnnnnnnnnnnnnnnnnnnnnnnnnnnnnnnnnnnnnnnnnnnnnnnnnnnnnnnnnnnnnnnnnnnnnnnnnnnnnnnnnnnnnnnnnnnnnnnnnnnnnnnnnnnnnnnnnnnnnnnnnnnnnnnnnnnnnnnnnnnnnnnnnnnnnnnnnnnnnnnnnnnnnnnnnnnnnnnnnnnnnnnnnnnnnnnnnnnnnnaatatatctatataaaactgagaaataaactgtggcgaatatgtaatttttgcttgtacctatatgggtaaatgtatttttattcattgtattttcagtagtggaaaccatatatatttataatatacacatgacttattcataaagctgtggaataacaacatatacatttctcatatcctcatcatttttctcctatggtgaaaacagtacaaaatatattttcttagcaattttcaatagtatattatactattatttactgtatatagtcaccactatatacactagataacgtgagaaattttgtaacctttgacaaatataaatttcctaatacatttgatgtaaatgaaacttttcaaaatcattaacgaaaacacattaatcaaaacaggaaccttaatgtgtattgtcaattattaagtgaaaggtaatctttatttttctattacaatgaaataagccatctatgtagaatgaatatgtgttaacaaaaataatagctaacatatgatgtatataattattacatgataaaatatgaaagagatatcatcctttagtatatacaacctggcctatttttttttattttcagaataattgaaaagtatagtaatttataaaagatacacattttatgtaataagtctctcaagatataaacatcttttaaaggactataatgttatgaatactacaatttcattagccttctcaaaatgctaatgacatttgcttgtgtgtaccagggagatcaaaccgagagacttgcacatggttgataagtagtctaccactgagctacatgcctatccttggttttataaaacaaggtgtcaggctggcctaaaagtcataaatgtaatcagggcaagtctccaagtcacaatagtcctgcttagactctctgagtagtggaattataggttcattcactatagaaagtgtaatagctacttttctcctcattttggacagttaaacaccaaataaagtataatctttttggaagaaaagatgcaaaagagggagggaggaggaaagggagggaagcaggctgactgggaataaatttgtcttcatttgcaaataaactgttacaaaataaaacactgaaatgtatagctttactgatcataaaatcaagtaagttactccatttcccagatgaaaaatataaagttgactacattttctttggccacaatgctaaatagaaaaaaaaattatactcagaattatactcagcaatttgcaattgctaccttcctcctatacaagttcattattaacaactcaacaagtaatataaaaattatcagttaagccagatctactgcaacacatcaaagttccatgtcactctgaggactgaagctgaaggatcacaaactcaaggccagcctgggttacaaaatgaagtctggcaatacaggtcggtgtataatgttccgtccccagtagtaaccccaaacaattttgttgatagcattctttgctgggtttctctttcatttcatgatgtaaattataccttaaattcaccaatggatgtatttgcttgcaaaaacaaaaaacagtaaggtattttcattttgattattcattttgttttccatcatgaaagaaagggaaactttaggcaataaaaatagtactgatacccccaaatacactttttgttgcacagtattctagacacaggttgtgaaaaattcagcatgggctctaacacaatacaaacttcttgatactcattatagaacctgttccttccatctaccatcctcataaaacaatagaacatccctgaaaatctattttcctttctacttcctaattaataccatatttctttagagaagaaaatactacagaagatggactatcaaaacacagagacgtaattacatacaaacatttaaaattaacgtcaaaacatgtagtaaatatgagttgatagtcagtctgctagaaaagtattgagaagtctctagcgaaaatgtaatagttgtttttggtttgggaatagcagtgcttgtttgacattacagaattctctactcagccagaatgttgcagactgtcatgtgccatccctgtccactaacttccttacttcatcatctctttgaatttcaaatttcaaatttcccaattttcaataaattgaatgacttccttttttgttttgcaaaaccaacccccatcctctttcaatgatgtccttttccaaaaggactaaggtgtgaacaaaagttcagtaatgaaatagaaaagctctgggagtgatcaaaacaacaaaagtaagagcaaataagatgaaatacactgtcaaaggtgactccagatcatatgcacacggcagagatacaaaaccatgatgggataagagaactcccaacaataaagtatattcatttattcaattgttaaaaaaaaacaagggataaatggttcccaggaatggaagtggcatgaactcctgaactaattgggagcatnnnnnnnnnnnnnnnnnnnnnnnnnnnnnnnnnnnnnnnnnnnnnnnnnnnnnnnnnnnnnnnnnnnnnnnnnnnnnnnnnnnnnnnnnnnnnnnnnnnnnnnnnnnnnnnnnnnnnnnnnnnnnnnnnnnnnnnnnnnnnnnnnnnnnnnnnnnnnnnnnnnnnnnnnnnnnnnnnnnnnnnnnnnnnnnnnnnnnnnnnnnngtaggctgggggtgggggaggagggatggaggtgagggaagggagaggaaaaagggactttcatgtgaaacaagctggttccctaactagaactaataaataaattaaaaaaataacaaccgaatagttattttaaaagtaagttgaataatttcgtttgatttcaagacttgcgagctcacaaacagaaaaatcccagcaacatgcttatatatatgtcctcacagcatgcgagtaacatggttcttcaatctctaaagaagtgtttggttattcgtatttatctagcatcattcatattgatagctcagaaacgtctagtcacatatttgaaatgttaatctatttggaattctttctcctcaactcaactcttctaaaatagtatatttttaattcccaggctcatttaaaaggagaaagaagtcatgaaagtgaatgctagaatcagcatgtgaattattattacttgtaaataattcaaaaataataagttcaaatagcatataatatgatgaatgttttccaatgttgaacagcaaagtaagagaataattagtgtcgattaattgtgtatttcataatagctaatggagataatttttaatgtccatagcacaaaaaattgataagtgtttggaatgatttatatttcaattaccctgatctgatcattacacattacatacatctattaaaatgtcaaaacctgtcctataaatatatacaaatagtatccatcaattagattttaagaaaataatttcagataactaaataaaagcctcctaatgactaaacataacacatcctctattccattcccagaagaatgtaatgatgaataagtaaatggaaggaatactttacaacttacagtgtgacttaagatcaaagagtatcccaagattgatggcctctcacaataatagcattatgctatttcaatcaaggttcatatgctgggctctaacacaatacaaacttcttaaacattttctatatgaaagaaatattcattaatgcttaatacagatatagatttggatctatttcagggtgtcctttattccttgacaaataaatattaatccccatggggaaatttatgataacataatttcttgtaaatctgtttacagcacttcagtcttcagtaccttttgataaatgaatattgaaaaagcaaatttaagaatgcatctcaaagaaactcattaggaacctgacatcaaagaaggtacagtacaatattaaaacacatgccacacacacacacacccacacaccaccaccaccaccatcaccaccaccaccaccacctacatagatttcgactcaaaaccaagggatatattcctgaaaatagggggaattggagacaacctgaatattatcagcagcactggattttacagaagagatcaaacatctagctgtgggtttatttgggatgaaagaaggctttaaaaccatattcatgtcataggctgctaaacaatctcacctgaagctcatttacttgtaaaagaacactgtaatatcatgctcgtttctacattctgcctgtatggattccatctcaacacaaggttttcaggttgaagttgcctcaagtgaaatagccttactgataggtgggaaatttccccaatttaaatgtccattatctaacatcagtcaaacagctggggtcgaagagcaactactgttgtctagtgcacatggatctcctctcaacaatccacacggaatacttagctctcctaggtgtgttagctggcatcttaattgtgaattgtcagctatccaactcctatcaaaagtttagctgagatgatagatatgcccaggggagaacctcaggggnnnnnnnnnnaaatataataaaccttagtaacaggttagaatgcaggaaatctgcaactagtactattactataggtgtgagtagaaaggctccatgtgggaaaagaacagtcattcattcatagagattctctgtgtttcatgaaaatttattgaattggtttgtacagtatctctgatttgaaaaacatgaaataaaattctcaagttcaaaattaggaagattccccccctttaaatcatgaatgcaccataatttacaggtgaaaattctgtcttgcaatatattgctacccatgactcttcagtacaaataatatacactcagatcattatgtcacaatggaccagactttggaaatgaactacgttctcctctattttagatgcttattctttatattctcacatatcacttaaaaaaaaaaagatgtgaccttggtggaatatccacatcatgtaaaaataaaacaaattcaaacaaagagcccctatttatcataactatactgaaagttacccattaaaacaattcaaagacttgctcagctttgggtgtgcctaatgattttttggtttatttgtttgtttgtttgtttgttttgagacaggattactttgtgtaaaagaacatgttgtcttggaactagccttgtagaacagtctggcctcaaactcagaaatccccctgcctctgccccgtgagtgctggattaaaggcgtgtaccaccacagcctggctgcctaattccttttaaaattaatatagcacacaaagaccttgtttccttctattatgaggtataatgctgaatgtaactaaggcaagaaaattgcattttaaacaaatatttcatgattaaaattttaaggtttcttaacatttaagttagtttggtcaaattaatttgtatgtgcttgagactaattgataatactgaccaaaaatttaacagaatgcatgaaagttgatataacagcaatgactgcagcattttctattctctgcataaaagtactactaatattctgaaataattcatgtactagaaacttacagcaaacaaactgcaaacataaatattaaaaacctgctttagtaatagtactcaaaatgctgccttctgagctgtgcttacatttttaagtcctgttcccatttctacaccataaatcattgccttcattattccatttttcataggtagctctcaataaagcattctaggagtattgatctgtacttacctttatattaattctctaagtagtgttggctgcattgccaagcttttaataagtttaatacaggctgtttaaatagttattaacactcataattgagaaaatacttctattgctaatttgtactgctgtcaagatccagctacattcattacactgactatgttaaacgcatatttgttaatatgctagaaaatgtgtttaaacataaatgaaagaactatcaagaaaaaatacatcagagataacacaaacaactgcacatttgtaaactcgagacaattttattttccattttcacatgtgtgaaaacatttactgaggaagccacagtcacaggaagtgagcacaatcattttgccttgggtttggcagaaattcagatactcagcaaaacagaagaaaagtttccaagcatgataacatatccctcaagctacaaggatatttccagaagaatgatgaaaatcatcctattcaatcacaattctaggatgctattttttaaaatatttaattattcttttggaatttcagacatgtatacaacatctcttgatcacatccacccctcatttccctcctttgattttccacagagcccttctactccaaactccatgccttctttttcaaacaataaattccattgttcccagttaatgctggccatgtgtgtgtgactgtgaggccatccactgaagaattgttaaccaagcaaaggtcacacaccaccgggcattgatggctcacgcctttaatcccagcactcgagaggcagaggcaggcagatctctgtgagttcgagaccagcctggtctacaacagctagttccaggacagcctctaaagccacagagaaaccatgtctcaaaaaaaaaaaaaaaaagcaaaggtcacacccctcaggaggtcaaataaaagtgacactccatcccctggaaaccataaattctgaacagctaaatcctcagcaagtggttaggccctttgagccacttgcccatgctgcaaaaattttgagtggcttcatcttctgcagttcttaggcaggtaaccacaggtactgtgagttcatgtgcacaacagccaagtcatgcccaatattttacaaaagtccccatcctccaacacttacagctttactaatcttcaaaatagtattttctcttttagttgagtgttgagaaaattttctggcaatgttttattgcatcacactttggttcctcatgaaatatattgccaaatatctatatatcctataactgcttcactgggctaaaatgttccaaactcacaagtcatttcccattagacagtgcttccttttataaattcaggaagggaataaaaatacaaatttgtaagtcacatactgctctttctaaatcacagagaccatggtatgtgcaaagtctagtgcaagttgtgatgaagggactaagattccttttactgctgaagtacatggatttttagagtattagaataataaacattgtatttctttaagtcactgtgaaataaaaaaagaataatgggtaaagcatgcaatgctgtctgcagcttatgaatatggttcaatcaaaccaacacattccaatcctatgtgggagaagttatattcattatcttattctgatcacagctaaaaatgcatggtcacaaaatagtacaagattaatgagaattctttcttcctgcttaagaagcacaggttgttcctaatgggtcaatatccacatcaaatcacacttttttgtacataaattacacagtatcagacatcatgaaacaaacaagactgcaagtgtgccacttccccagaacagaggaaaaattaaatgagaaaagaagacatgtgagcatgaaacaattataaaacataggcagctactaataaatatgcataacagaatatacataatgacggaatgcacagtaagagatttgagacatcatgagctaattatagttgataagagaaatttttcagcatttgcttttagcagaaaataatagaactcaattaactttattttatcatcagtgaattaaataataaaaaaatgtgaattgattattccatttaatattttaaatatctgtgattgcggttgcgcaaaaaaaaaatgggaatcagtctacctcaagatccagcaattcctctcttgggcatatacccaaatattgcatgtccatgcaacaaggacatataagttcaacatgttcatagcagcattgtttgtaatagccagaaagtggaagcaacctaaatgcctctcaactgaagaatggatagagaaaatgtgatacatttatacaatggagtactactcagcagagcaaagcaatggaatcttgaaattcacaggcaaatggatagaactagaagaaaccatcctgagtgaggtatcccagtcacaaaaagacaaacatggtatgtactcattcatatatgaattttagacatagagcaaaggattaccagcctacaatcctcttcaccaaagaaactaggaaacatgaaggactctaagggaaaaatgcatggaccccaggaatgggaaggggcannnnnnnnnnnnnnnnnnnnnnnnnnnnnnnnnnnnnnnnnnnnnnnnnnnnnnnnnnnnnnnnnnnnnnnnnnnnnnnnnnnnnnnnnnnnnnnnnnnnnnnnnnnnnnnnnnnnnnnnnnnnnnnnnnnnnnngggaagaatagaggagagcaggatgagagataccatgttacagggagccattataggtccaaggagagatctggcacaagggagattccagagacctacaaggatgacaaaaactgacaatctggcagtggtggagaggacaacctaaatgcccttcccctataaagaggctgatgactactttttatgccatcctagagccctcatccagtggctgatgaaagcagaggcagacacccacagatatacactgaactgaactctggatcctagttgcagagagggaggaatgaagatcaaaggggtcagtagcaggctggtgaaacccacagaatcagctggcctgtacaagggggggtacatggaccccagactgctatctgggaggacaatacaggctgatgcagacccctaaacatggatgtcaattaggaggcctccgcactctagggggcccctggtagtggattagtaattttccctgttgtaagaagggactttgagagccctttccacatgaagggatgcactcttggcctggacacatgtgggagggcctaggcccggcttacaaaacaaaacaaaaaatatataatctttgcttaatgggaaaaaagaatatataataaaacttaatggtgattttttaaaactagttcctgaacacaaagaaagcatttataatcatggtaagaatggggagtcagccgtgagagaaaaaatacatgggttcttttggatatcaggttcaatacacaattatgcaacaatagtattaaaatgtacttcaacatttcaagaaaaattctggggaatgggtgtcaggcatggtggcacatgctttcctctgtgagtttgaggcccacctcatgtacatagtaagctccaggccaggcagggcaaaacaatgaaaccttgtctcaaaaaaacaaaaatgtctggnnnnnnnnnnnnnnnnnnnnnnnttcagcagttaacacttgctctttttgaagaggacccaagtttagttcccagcgcctacacaacagctcccaatcatatgtaattctagttcaaggagatctgatgtatcctttggcctctactttcaacagacacacactgcacacatatatacatgtaatcaaacattcatatacataaaaaacaaatctttaaaattcatctgtgttaatcaaacataataaatatttaacttttaaaaattctctaaatttgtagagaaacagtcacccacctttgtgaaaataatttctagccaggaagctaattctatgcgccaagataataagaatggaaataagcaaaggagaacataaaactcataggtttatactggaagctttcaataaggagtatctgaggtgcaaagcaagtacaccaacttagaaaggaaagtgagagcataaggaacagaaaccaaatctcaggcatactccagagtaactccatcatataagatatagccctcataattggtaaccacaaaaaatacttttttataagaagaaaaaatctagcaaaatacaatttcactaaggaggctaaagtgacaaattttatattttctaacttttctgagctagttaatgccatttcttgaaaataactgagccttgttttgtcattttaattgatttaaagctaatgtccctttgcaaaataatggtggattgaacattatccactcagaacttcagaatatgactttacttgaaaataggatgtttctagatataaaataaagatcacaatgacatttctagtggatcagagtgggccataagtcatgtccttataaaagacagacaagtggtccaagaataaataatccatggaaagaaaaagcaaaggctggactcaacctgccacaagccagggaaaccaaggagccagaataggcaaaaatgcttcctctaagctctgggaggaagctcagtgaaacttctgtcttctttaactttaagagtctaaatttttaatgttttaaactactgtctttgtggtgattgttgcacaaatcatatgagattaacaggatgattctcagtgatccctaatttcaaggactatttaactgttgcacaatacactgtactcaaagtgatttgtctttgcttgtagtgtttgttttatctgtgtaacttaattcatatactttattatgattcttggtttcttctaatgctggcttcctttttgctgttgcttcattgattttatttacatatttgtttctatccagtaggaagattaatctgttgtttgctgtgttggtttgtttgcttatttgttactttctgagagggcttttaaagctgaaaatatctagagagcaaagttccatggtttacagtgggttttacctggtggaaataggaagtatattccattgtatactatggggtggatgctgacacttcaaaggaataaaatgaatcttctttaatgtacaaagtgttagtaacattaaataactatttcctacagcacttctacacactttatttaaaaatcaatgatactatttactgtgggttctaaatggaggaagacattatcctgtaccttcagaacttatttagtcttgtgataaaaacacaaataccactaacgtaagagtgccatcaggaactatatttcgactgtgatatgaaacataaaatacatccgtgacaaaattattcacaattttaggaaggaaaattgaaatatgtggtgataaataggagacttttgtttctgcctcccttccaatctttgatatagacttggatttacttttgacaccgtcctttccttaatcttttaataattcattcatttcaaatggcattctatgttaagtgtcatcctttccatttcttcatgggagtttatttacttaagagaaatgcagatgctgccctaggatgtcagatacagaactgatgaagatcaagaaatggacatagtatctatctgaagacaaagaattccaaggtgtgaatttttcaactactatctcacttataactcactatggccataaaaatctttatactgagttctccaatatgggagagttaaaacataaaggttccagctacatttctcagacatcacctggaatatatttgtttccatctaccagagatgctctattagaaatctgaactgggcaatacaaagatcatgtagttaacacaaataatttgataattgaagagtcaatgtcaatatttgaagtttaggatgattgtcataaatttgttgtaactgagttaagagaggcttgtgaaacctaactgggttctgttactaccttagaatggctaaggacctgtcttctcaacattcttgctattcttagatgtggtagtttggatgtaattggctcccataacctcacagggagtgagcttcttaggaggtatggttttatttgagtagctgtgaccttcttggagtatgggtgttgggagagggcattgagatctcctatgtataagctactcctaattcagatcactcccagttgcctatgtatcaagatgtagggatttcatccccttatccagcactatgtctgcctgcatgccaccatgtcctgccatgatgataatggactaaacctctgaacagtaattcaccccaactaaatgttttcctttataagggttttcgtggtcatgatatctcttcacagcaatagaaaccctaagacactctgctctgtcctgcagcaggcacccgagcctcagttgagtctgggcactgctctgaccccccccccccccccccccccccccccccccacccccccccccctccccctctacgtgtctgagcctcaggtgagtctgggcgctgctctgccatcccaaccttccccatcaaccccttctcacttctgcctgaacccctcccagacaagagtggactttcccagacaggaaggcccaccctgagtctggacacacctcacccctgtccacactctgccctctgtcctgaggcaggcactggagcctcaggtgagtctgggcactgttctgccccccgcaacctcccccataaactcctgctcacttctgcctgaaccctaccccagacaagagtggaccttcccaaactggaaggcccacccagagtctggacacacctcacccctgtctacactttgccctctgtcctgctgcaggtgcccaaatctcaggtgagtctgggcgctgctctgctccccaacctcccccatcaatccctgcttccttctgcctgagtccactcatagaagagtggacctgacctgaccgggaaggcccaggctgagtcctgacacaccccaccgttgtccacacaccaccctctgccatctggctgccaacagaggctgaacattccgcctgctaccggaaagagagagagaccccacctgcactcactggaagaagggatagaaaaaagacagagtaaaaacacactcaaaaacagaaaaaccaatatgacaccaccagaatctagggactccacaccagctagatctgaaaaacccaccacagaggatgaggaagagatggacatcaaaaattatcttaggaagatgatagagatctataaagagtaaacgagaaaatcccttaaagaaatagaaaaaaaaaaacaagcaaaaattacatgaaatgaaggaaaagccaaaccaaaaaattcaagaagtaaataaatctcttaaagaatctaaagaaagccaagaaaaaacaaccaaacaaatgaaggaagcagtcaaaagagttcaaggcatgaaagctgaaatagacacaataaagaaaacacagaacaaggggatcctggaaatagaaaggctggataaacgatcaggaactaaagatgtgagtataaccaatagaattcaagagatggaagagagaaactcgggtgttgaagactcgctagaggatatacagtgatcgactaaagaaaatctcaagtccaacaaatccctaacacaaaatatccaggaaatacgcgacactgtgaaaagaccaaacctaagaataataggtatagaagaaggtgaagaaatacagctcaaaggtacagaaaacatattcaacaaaattatagaagaaaactttaccaacctaaagaaagacatgccaatggaagtacaagaagaccactttggaaatcagtatggcagttgctcagaaaaatgtgaatcagtctacctcgagatccagaaattcttctcttgggcatttacccaaataatgcatgtccatacaacaagcacatacattcaaccatgttcatagcagcattttttgtaatagccagaacctggaagcccctcaactgaagaatggatagagaaaatgtgatacatttatacaatggagaactactcagcagaaaaaagcaatgggatctttaaattggcaggcaaatggatggaactagaagaaaccattctgagtgaggtaacccagtcacaaaaagacaaacatggtatgtactcatgatggggaatgcactttgtatgtttatcttattgattgttaaataaaatactatttggccaatgagacagcaagtagacaggactagaagtcaaagaggattctgggaaatgtagtagagaagtgctgatacaggcaggaagtgacatggcaaggagactcatatttaagcgaaggagaaacaggaagggctctcttttcccctccgctcctgttccagtggcatgatgtgatccactgacaaggagggatgccaattaggcgtccgataagataagttttataaaatatataggtttatgatagttaagactgaactaacagataacaatcctagtcattggccaagcagcattgaacctaatacaagtttctgtgtattcatttgggcctaactcgggagggcagctggcgtaaagctcacacatggcagtggggctcaggcgacttttggcggaaagatttatcgtaacatactcactcacatatgaattttagacatagagcaaaggattaccagcctacaatctcttcaccaaagaaactaggaaacatgaaggactctaagggaaaaacgcatggaccccagagaatgggaaggggcaggatctcctgaggagacagagctgccagaatgagaggaggagaagaagagaggagaggaggaaatcgaggagcagaaatattgagttgggggaagaatagaggagagcaggatgagagataccatgttacagggagccattataggtccaaggagagatctggcactagggagatttccagagacttacaaggatgacacgaactaacaaactaggcaacggtggagaggataacctaaaggatgcccttcccctataatgagactgatgactactttttatgccttcctagagccctcatccagtggctgatggaagcagaggaagacacccacagctatatactgaactgaactctggaacttagttgcagagagggaggaatgaagatcaaatgggtcagtagcaggctggtgaaacccacagaatcagctggcctgaacaaaggggagcacatggaccccagactgctgtatgggaggacagtacagaactgatccagacccctgaacacggatgtcaatcaggtggcctctgcactctagggggcccctggtagtggattagtatttttccctggtataagaagggactttgagagcccatcccacatgaaaagatgcactcttggcctggacatatgggagacccaggatgatgtggtggactttggggagcccctgtagagggccctaaactgcctggggaggggagggtggatagggtgggggacaggtggcggggggagagaagaaagaggggagggagagggagaagggattgagatgtgaagaaagcttgttccgaatttgaactaataaaaaattaattacaaaaaaggtgacaaatctggacattgggtgaaaaactgccctcaacatcacccactgccaggactgcccagaatgtggacaagcaggacactgaggagttgaatgacatgctctgcctaaacaaagcaggcatgtccccacccgaagttcctcctactccacaggaaagtgtattggatcctgtagacctggcagttaaaggctgatgctgtcctgggacctcttccccccaataatcacagaggaacctaggttactgtccaggcaactggccagtctttgtcatttattttttcatttattttatatattttttaaattttttattagcgcctcaggtgaatctgggcactgctctgaccccccctccctgcatcctgccccatcaacccctgctcgcttatacctgaacccccctcctaggcaagagtggacctgctcaaaccggaaggcccaccctgagtctagacacacctcacccctgtctacactctgtcctgcagcagaagcctgagactcaggtgagtctggtagctgttctgccccccccaaggtctcctatcaacccctgctcgcttctgcctgaaccacccgcccccagacaagagtagacctgcccagaccggaaggcccacccctgcttgctttggtcttttttttttttttctttttttttgtttttcgagacagggtttctctgtggctttggaggctgtcctggaactcgctcttgtagaccaggctggtctcgaactcacagagatccgcctgcctctgcctcccaagtgctgggactaaaggcgtgcgccaccaccgcctggcgtgtctctgtcatttttaatagatcccggaactgcttggtctgtacttcctattaggtgaaattcttccttctcagatctcaaatagtgttaatgacaatgctagtatcagccttgtgagtttaacagcagcaaccaaggcttcatctgccttttcagttctcttcatgtgtaaaaatcaggcttcaggccttactcccctagagctactactaggtctaggcacagtttaccttgttaccagactcagaaaaaaaaatttttttaaggtgatttaaatacttaaaaagtgaaaaatgctttagatttctttcccttgctatgctactgcaatattaagtttcaggaattcagaattttaacattaatcaatggagttctgtttccccacctgcctatttctgtgggtgagatctcttccccttcccctgtccttgggattcccctcccccagctaagaggaccatgggccaagaaatatcaattgtacacctaaggaaaaaaattccctctaaacttaactctaccttctgcccctaatatatctgttccagaagatttccaaccaaagatggcaaagtgctctaaatgatgcttgcactttcctaaccccagaagtcccccagagtccagagaagtgaaacagcttcccagacttggccagcattccagctttttgggtcctcaacaacaatgccccagtgtcaacaggaactaggcacaaatgattatggccccctttagtatcaacaaaaggtaggggtgttacgtttcaaaactggaacaaatgactgaggtacctatttacatatagaagccaacctggccaccaggctctcccagtatccctcagttcctaccaggttatggctggcatgtccatcccctaccctaaactttccagcctagggaacagactgtccttcccccagaggctctgccctgcataatcaagacattttgattaccagtcctttatacctttggcctcatggctgctgcacatggtttctgcccccacaccccttcccccaagtagcccagcccagtctggttcttgtccactctggacttacccagacatccctgcctctgactatcctctcctacatctctacaatgaactttctcctccaccatacctaggagcagccatgtcctttcctttttatttcctttaatttcgggagtatctagaaagagataggggaggaatattgaagggctcttgaaggcacagaatgtttaaatgtcaccaacaggttttgccttttactcttctccacattccctctactttgctgtttttttatccctctgagtcaaattaatctcttttgtcctgagaacttggtcttggggtgtcttgtgacaatttcagggttctttcatgtatgactaaaattaattagctagatttatcaaagaacaaaatattatttaaaaaataccacttataggatctggagagatgttgcagcagttaagaacactgttcttgcagagagtccaagttcagtttccagcacccacacagtggttcacaaacatctgccactccagtcaggatatatgatgccctcttctgatctccaagggcaccaggcatgcacgagatacacaaacacccatccaggtaaaacactcacgtgaataaaataaatatcttttaaaacgttaaaaaaataaaaattttaaatagcatttatattttatgtgcttctgaggagagtaaacactgaatcacaagatcttctgcaagatttttcagtaattattttaaggactgatcatgaaaggccatcactttctgactattttcctgaaaacagattactgactgctaaatagcaaaactatgttataggtttttgtcaccttttaatgaatgaagaggatcaatattcttttctacctatctgaacacacataggcaaacccatctattactagaaaaatattgttctttcctgtaatttaaccaaacaagtaatttgaaatacaccattttattgtatgcataatggagggcttaatgatcagtgacttaaaggcctctcatatttaatataaccaactcaaaaatgagttagtactagtaagatataatgattggtattaaaaataaaacaaaaatttatacttcataatagaagcttataacacttaaaaacattaaacttacaacattttctaataaatttggggaaaaatcacacaggaaacttaaaatttctttgcaaagctttaatggaacaatttagttaatttctgttacaactcattaagtcttctgtttctagaactgttataaagcttatctctaaacaaaacaacctgttttaccctagagtagaccatcgcagcagtgttggtattgcaccaccatgagaaaaacatagtctggcacccacatacaatacaagaaaagtaaactaatttaatagaaaaagcaaaaccactgaaatcacatgttaaaagtaattatttgaagatgactcaaaaaaagagtgaattgattaaataagtagtcaaatattgtgttttaagtaaataaatcaatgttaatcaaatcaaattactcaaacaattgacctaatatttgaaatcataacaatttccagtaaagctgtatttcttgtaatatatttaggaaaaattagcatagctaagattaattaacacagggaatataattctaatttggacacattttttccattataaatccatccaagggaataattttggaaagaaactgtactgagtccagttattgggtctaacacttcaaatctcttcagaaaaccaacaagttcaatggagttagaaatagcacattgctaacaggtggcgctgagaacttcggtcagtttcatctgcttttgcaatttggggagagtttttttgttgttgttttatttctttttgttttgttttttgttttttgtatttcattgttgtcattcgaaacaaatggtatttcctaaaagtctgaacagtagaacaaaaacatcttcagaaaccgcaaaatcagttatttgcctcagcctgaaattttaaggtactcactatccgaggtggcagagatgcgttgtgtggaaatcagatgctcgatagcttgagtgacagcttcatcggtaagtgcatggaggtctcttcgcagctcactaatagccttcccttcctggtgaggacattcttgaatcagacgcagcacctccaaatggatgaaattaagactagctgccttagcaaccctggcggcggctgctcgggctcgggcttcttccaagaggtgccttcctgtggacacaccttcacgactttgatccagcatcatgtgggcattgacgacctccaaggtgtgtgtggacagctcattcatatcttccaggacacggatgcttagaaccccaagccgtctggttccctccgaggactggaggacaccaagcactttggcatacacgccaactggcaggggaatcacacattgcctgaccctctcgcgcgacaggggctgcctggcctcgatggcctttgcggtcatgtcatcaatcttgtacatcatgtaccgcgaagctttcttggcctccatgatcatccccacgatagagacccggtgaagtgcaaagcccctgatcttaaacacgttgtcaacctcaacagcagtaagcaactggcttatgcagcaaggcacaatgctgtgaatgccaggcctggtcaaggtggtcatgggaagacccaggtcctgacctccagcttgctcatcactgccgcttgccctgttagccccatcatcatcaacaaagctatcattactcccaaacccactcttactcatcatcttttgaagtcttggcaggatttgatggctcgacagcaagaggtgttcgctcacaggctgcacagaaactcgcttgtcgacggtctctcgaatctcagcaagatggcacctccaacctcggactagagctaatgcagaatgccaacgcctcaagaccttactgaacagccaatcagctaccagatgaggacccaacattctcgcgagattacaaagccctcctccgcatgtttttggttgctatgcagaattctaaaaatagaaagagtgcaaactgtccagccactgtaatacatacactcgcgagatttgaggatggaggatctccaagagcttgatgcccacctggttcacacagttcgagaacagcctgagctaaactacacagggggaccttgcctcaaaataaaatatatatatatgtatatatatatatacatatatatatatatgttcttttcccccccaagtatgtaatatcaagcactgtctgctatctttataaagttgcatttgaagtagggaaaatatgtactacgcactccattattgaatgccacaattgggaggggggttctgttttatttttattcctgtgtgtgtgtgtgtgtgtgtgtgtgtgtgtgtgtgtgtnnnnnnnnnnnnnnnnnnnnnnnnnnnnntgtgtgtgtgtgtgtgtgtgtgtgtgtgtgtgtgtgtgcatctgtacagatatgtgcccaaaatcccagaggacagttagggtcatatccatacctggctgtggtggcttagcactgcggaggccacagcagaagggttacttaacattcaaacacagcctgaaagatgttgttagttccaggctggcctggcctacaaatttgagatggtacaaaataaaaaaataatagagatctcaaatcttttcgtgagatcactaaatcttaaaagcatgccattttagaaatagcaagatagcaacaactaaaaaatgcttctaacctaaagcaagtcacatcttaacactgtctttattatgaaattataactttcaaattttatcaaaaatatgactctaaataacaaatatatcgaatttatacctgattccacctaaatgactgagatttaaattattttcagtgctttatgaactagatatcagtctgaaaaatataagggaaacactaataaaattacattgtctttatatactcattttagtaaattctgaactcaaaacggtgataatttagcatgtagatcacagaatgattcaatattacattgaaatctatttttttcataagacattatttgggatattactaattttaaagcctgttattgtcaataaagaattattattcaaacccattgctatcaaaaacttgcctctttataaacatctgtaagatagtttaatgaatgtataaaatagtaaggaattaattaatagtctccatttctttatttgtttaaaagtagtttgagctatctcaaagttacaaaaatgtgtgtgtatgtttgtgtgtaacgtggtctatgtaaaatttaaatataatatgaaattatatacatacgtataatcacaagtgtaaaaggaataaaattttaaaccaatgtaattaatgtgtttcgcaaatatataacaattttcttggtaaacaaatagactaatatgcaaatgtaaatatttagcttctagatttaactccttctcaaaaaggaaataactattaaacaattacctatattttaaaatcatacatgagtaaagatcaaaatagctaaacagatgtttttaaacatttagaacttgataatcagacaatgctcttctattagatgataatacacttctgaacagaaaaatcatgaggttaaagtaacatatctgattatacgaaatatctatatacaatacaaaatgtatgaatcctataaaaatgataagaactgcctacctgacaggattgctggttaaggaaaccctcagagattccagacagttgagaagtttctcatctgagatacctgatttcaattcatgaacatattcttgtgaagacagggtgcattcatgcttgctgtttttcaggccaccctatcaaacaaatagaacatgtcattttaaagaggtgtcaagggttttttttttaaatcttgcaagtaaaacatagactatattaataacattatgacatttttcaaacaaagtatgtttcaataatcttttctcctaagcaacattaaaatctaatgctttgaataccaatttaaaaaattaaaggaattttaattacaagaataaagattatatcaatattttactttgtgtgagtgctatgccacctcactcttttgtttcaatactctacctccatgttaaattcccagaccaacaattcttcaaagacctgagtgggaagactattgtgtaggatacattctcctcagccctttaaaagagaattatactagctggtgttcacagactgaaaagaaacctgatgtgagtagcaaaaagtattattgacagggttatttaaacttatattccaagtattaggatttatgctaactgtttccctcaattcaaaatataaacattgttagatcatcttattaattttgtagttgacagttaacatttatattcagttatatgtaccacagaaaataatatttttttggttttttgagacagggtttctctgtatagctttggagcctatactggcacttgctcaggagactaggctggccttgaactcacagagatctgcctacctctgcctcccaaaatcaaatcttttaacattctcattataggaataaagaagtcagcggagtattgtgatgcacctcccataccagcccttgggaagcagaggcatgtggatctctgagttcaaggccagcctggtttacatagtaagttctaagacagccaagactacacattaaaacaggtagattctggggaataggtaacggcataattagtgaggtttcagaactaaattataaatattttgaacttccaatgattcatttatccgttctatgccactttccccaatgttgaataaaaaattgaagcaacaggaatataagtctgaaatttctatttgaaaaatgtcaaagtgtgtatcttcagcataatcaatatggcacaacatagtattaaagaaataaccctgaaacaaaacagtgtgatagattaaactaaatctcactgtacttaatagagctgtaatacaagaacggcttattattaacatccggatctgatactgaacaaaggcaacaactagataatagatggataataattgaaattttaattagctgctctgtatgagattaatgaaaattaccactgtgcccatttgatctttaaaaagtaatgcagacaaagttagtaattagagtacaacatgctattccaaagctaggtgaataaaaaggtttcctaatttgaagccattccttaatttgaaaatcattagaatgtagaaacttgtccgtatgactatgcttatattatcctaagtcagtacacagaaaactaaaatgtacttttggtaacatccccctttactctaaaataaacttttaatatcaatactagacaagaaatattttaaaaagaatgttctaagtctgcagtgaaaatgacaaactaataagtttagttacttggaccaatctttttttttattattagaaagaaaattattttacatgtcaatcccaggtccctctccctcccctcctcgcctgccctgccaactaatgcactatccatcccataccttttatttagtttttaatgtaaaaacgaattgacttttaatttgagaaaagcctacagaattcttagttggaaacataacatgctgtgaacactggctggaaccattgattgtacatagctctttcagccatggtttgcacacagatagcaattactgtccgtgggtccacctttagagagggcaatattatcctgaaaaatggcaatactgctattgcttgtattggctaaattttttcaacatgatataatctgtagtcacctgagaagagagaacctcatgtaagggacccttctatcagactgtcctgtaggcatgtctgtggtcattttcttgattgatgtggtaggacctagttgacttgaagtagtacatctcctgaacagatggtactagaaagcaagtagagcagccatggggagtaagccagtaaattggaatccctctatgctctctgcttcagttccttcccacaggttcctgccgtcatctcccttcatgatagactttgatagggatgtgaaagctttaccaaaatttattatatagaggcgatcctattaagaaatagaagtttaatattttccctatatgttttatcattttacatctccaactacaatattaacttcaaacaatgtaacaaaacaagtttaataaatgttgttgttgattataaatgtttcctgcagcctacataaaaattacattttaagtaggtaatgaagctataaattggaaaggaaataaagaaaaatgtcttccatgagacaagaagtgatcccattatttccaacctgtaactttccaagcatttgagtaagtgctgtcaaaatgattgcactgaatactactcagttccttgtgtaactgctgacaggaagtaaagtatcaacaaagcgtgtaaaggatgagtaaatgagaactgaaagaactgattgattgtcatgaaaaataaacatatgcatgcctttcatactaattgagattgaaggacttagtcatcaatggtaccttacatgcttatagcacaaagagctttcactaaccttcctatagaaatacaccacttcatttgagcctagcaactaggcaaaatattgcttaaaaatgcatctgacaatcttgggggggggctaaattatttacaatgatgtactataccaaagggaagggaacaaacatttcctcactatactttacccttattagccatgtgaaactggtccgtttgtcattttaatcctggaccttaggttcctgttctacaaaacaaaaatattatggtgtctatctgtaggcttgttagagtaatataataatcttggtaaagaagaattatctggttgttccagttggcttttctgttgctgtgatagaacaaccaacctaaccaaacgcaactttggaatgaaaagatttatttttagcttatgacagtctgatcatgctccatcatagagggaagcaagggcaggaaatcaaggcaggatctttacccagaaaccacagaggatcactgttatctgcctttttctctagttatgctcagctagcattcttgtatagcacagacccacctgagtggtgattgtgttacctccccaacatcaatctatcaagacaaactctcacaggtttggtcaaacatgaatctgatccaggcaaatcttcaactggctttccctctccccagctgactatggttgtttcaagtcgacaataaaaaactaaccaggacacttatatacagtaatcattgaattagtatatacttacatgacatgttattttgtcgttaatttcatggtttcatgaatgcccaaacagttaacttatgaaacattatcattggcataaatattatcagcttctgatcaactatatggttgaagtagaggcaggattctaatcttcctgaaatattcaggaatggacctgtatcacaggtaagagattagaagtatattttgagaatccacaggaatccttgactggctgaggagggaatgtgaaaaagagagggctaactgggaaagtctgtcttttgttcccctaataatgagatcatttacatatttatattctgctgaagatttctaccagcaaagcaagtctcatgctaaataaaataaagttttaagcacactgggccacacaatctcaaaggcccagctaatttgaatgtgtgattcatagcatgtaaattagaacaggaattttgttttttttttgtgaaataagttgagttgattaccttactctctactggtgcattaaacgcaggtttccaatgtgttcattaaacaacaacatgaacataaagtatctgctatggggcattgggagtcagtccttcttatattagaatattaccacttgcatggagtatattctcaggtatggcaaacagtaagaagctgagacacaatgatgtcataacagagctcacattctgctatgtaatgagcagaaagattatcatagtatgtggtagaggatgagaccttaaagaatcaatgaatctatttgagggatgaagttcaaagactaataaatgctattcatgtaaggcagactaagctattttggtcagaagttaatcacagagatacaaaaactcaaacacagcatgtttggagatttgctagtacatcaatgaaactggaactctgggctaataactctcaaactagaattcttgaacatattttaatggttcctgctgtgggtaaggtaattttaaaactccaaagttccttttcttaagatgacagcattaagcattaactgaattacttggctaaccaccttctaaccaaatccagccacctaatctctgtttttatatctgtatcaaagaaaatacttttccaggaaagtgaaatattcattattgaatcctgatgaaataaccttagtatgaaaaagtatttgtaccaaaataaacaacaaatgacatcaccacatgttgcctgtactcattaaaatttaactgcagatgacacaggaaacacaggtggcaccactggggtcatcctatatggcactgtatgcacagagattatcaaaaatattaagtgttaaaagtgtaaagaaagggaccaatgtacactgtggtcagaatataattgtacatcaattatgaaaattagtatggaagagcacaaaaaagtaaaaataggactgtcatatgattcagcagtccatatctccaatggctatccatatgccaatgatatatctgtactcatatacttactacagcattattcactttataaccaggttaaagaggcaaactattcattatggatcaaattctttaaaattttcatacacacaatagaatgttacattgagatatgaaaggaggaaattctataaattgcagtaatgtggaagagaaaatgattatgcatgcacagagagacaaaatttgcatgatctcctttacgtatataatataaagctatttgatagagattgagagtaggatgtgagttaccacaggctaaggtacttgggagtgagggattggagagatattaattaaatataatacatgtctacagagagacagggggagtaggttcaagaaatctactgtaggacatggtcaactacagtttagaatatatctttgagaaattctaggagatctgtgtttttactacaataactgtgagttaatgcatttgtaaattagctacatttaatcacatgtgttgcaggacatcataatgtacactatgaatacacaacatttttatatgctgatgtaaaaaaaaacaaatgaacttgaggacaagcatggagacacattcctttgatacctgcactcaggaggcagaggcagacagatctctatgaatttgaagttacagtggtctacatagtcatgtcaaggccacctaggtttacataatgagattgtgcctcaaaactagatagatagatagatagatagatagatagatagatagatagacagacagacagacagacagacagacagacagatagatagttcgttcatgggtttaagagcatttgctgtcatttcagagacctggcttcagttcttggaagtcacataacagttctaactctagttccaagggatccaatgccttcctctgccttccatgggaaccaggcattcatgtagtgcacatacataaatgcaggcaaacacacaaatatatccaataaaaagaacccttttgtctaaattaaataaatgaataaatctgaaagcaagaatctgtaagtaggacatacattgagaaacaacgggggtaaagacagagcaaaaggtatttcatgagtaggcaatagtgaatacatgtgtagaggagggcactttcatttccctgggtgcaactgactactcagttttctctgtatgtgagctgatctctcaaaacattactacactgtaaaatgtgggactaactcagaatacaatcaactggtccctaaatgcccaggttaaattaaataaatgggcattaatagtggcataatgttctcactagtgtttaaaagaagcagacttatttaggttagcatatgtaaattttaagaatatgtagaaaatgggtctttaggcttcatttcagtaaactgaatttacttaacacattcaaacatttgtatttattccctagagaagtaaggaatttagaagttcttcaagcttctgagataaataattcatccctattgcatgagaaccaattaaacttctcaactagtactcaatgagtatcacaaaaacctgcttgcctcaaatctcaacctgacttgaaagaatgacctagtaagaatactgaactagtaattaagcataaaagctttgtagtttttataatgttctcacccataaatggtatagatgttagagtaagacaaatatgtcaacataaacagcagtgtagcattgccaatataatggaattagttttatagattaccaaccatgtctttctgcttttagcattgttacatctaaacatgtctactgtggatctgaacataagacaacacagtctcatttcctcaaaataataatagaactaatatttcataggtcacattctattaattatgccttagtgtgtctttttcaaagacaaaattaaggtaatctaaaacacaacaaatgcatatacattcttaaaagactttttctactatgtaaagatatggaagttaagtatcttcaataatttatacatataaactctttataaattacttcagaaagtgatagaagttcaaacttatcaaatatttgctatgcatcttatattttaagtggatgtttacactatagaaaatgtaaaaaaatatatactgcccaaatctgacatcagttaaactgttctgctgccattaccatatactttaaatataacaagacaagaaaaaatagtagaacatctgaagcacagtaggttaatgcactatcctgacatttctaaccagccttctttctaaccagccttctttcaaattcatggcatctttcccttaaactgtgtgtgtgtgtgtgtgtgtgtgtgtgtgtgtgtgtgtgtgtgtgtttgtgtgtgtgtgatatgtcatgcaccctaaatgtagaaacacaactcacacagtctgcataatgttacatatatataatgttttacacacacacacacacacacacacacacacacacacaaacacacacacacacacacacacacatgttttcaggtatgactatttggtattggacaatcaattggtgtgctcttctccggggtagactattgttcccattagaatgctcatttactgaaacataaagatttcaataaggagatccatttttgagatgtattttaaaattactaaatttacagatgcacatcttccagctaatttgtagcaattcaaacaaaatgctatgcatcattactgctaaatatgccaacaagttttttcaactaatctaaaacattgcaaaccattcactggaaacactatttcataaaatgttaaaaattgacataatttaacaaaaaacaaagggacagtatgtgagattaaagcaaattataaaaggtgaaatactattctttctccagaaaattactacttgtgtaatttatgcaaagcacaagtcttggtccacaaaagagaaccaatctaatgtactgaatacgtactaatacggcttctatgccaaaatttgaggagtaaacaacagtaaatgtcctgaatccttatgaaaataccttgtacatataagagatgattcatttataatgatttcaaagaagctctcaactcttatgacacattcattttcatggcagcaaatagcacttatgtattgcttttatttttttatctcagcgagtgaagttatttgccaaataaatattcctaaggatcatctatgagctaaatgctgggtaaatgaagataagaaggacacacatcataattttcaagaggctaagaacattatttgcccgtcatttgtatatttgttcattaccttggctttggtattttgataccagggctccttctatataccatgctgacctacaactcacaaatcttcctttctcagttcctcaagcgctgggataacaaacacaaactatcacccctgttgagaatgacattttcccaataaagttaatcatcatagataaaaaagtgagaacttgccgatattttgtgaagttttttttttacaattaattcaagtaataaggttaatttatttttgccattgctccactgcccctattttccaatggaaatagagcaaatcataaaggcaaacactttagtattatttttaaatgccatggtaacacatagttaattttttaaatacctgctggtccttctcaaaatataatataatatgtaagaaattgaatacttgtaaagtaagaggactaaaacagaagctaatagttcataacttaaatataggtctttgatgtatttgcacaaaaaaggcaacaaatgtatcgggttattattaaactatggaataaaagttatggcattataatatttgctaacattcaaatttcagatagaatttagatcatgtcccttatataagaactgtcttaaaaaacaaaaatgtattatctttaaaaattctcattattcccagtagctttccagtaatataagatgtattagccccattttacatatttaacaaattctttaatcagattttgcaataatacacagaaacataggaagctgagaatggaacctggggcattcaatttctaatccagtgtcctatccattagacttttaactctgatatctttggtacttttcattatcctaaaaggcacttgaagctcacttattcttgaaaggagtgagttagctgtcaaaaacacaaaggttcagaacttacacagcaactttttagtttggaaaaatagcacatttattgttattagtagtaacaaaatatggtaaattatcacagagaaatatacctacacacacacacacacacacagagagagagagagagagagagagagagagagagagagagagagagagagagattccacatgtaaaaaagtctacattttgtactaactgccttcaatataagttacataagaattaattgtgtagattaaaatagttgatacatagaagggcatagtgttgtacacatttatttatgttacttgggagggagaggcaagcgatctttgttggcttcaggacagcccggtctacacagtgagttcaagttcagccagggttaaacagggagactcagtttcaaaagaaaacaaaacaagcaaacaacaaaaaagccaaatttttatacttgaggatacacagaattccagaaacttacatacatgtgtgggtataaggtgaaaataaaacaggtaacaagtgaaagaataaaatgagtaacaacataagacacaagatagtacagcaaaatatagaaaagaaaaaaagaatggtgggaaaaagaaagaaagatagaaagaaatgaaagaaagaaaggaaggaaggaaggaaggaaggaaggaaggaaggaaggaaggaaaagaagacatgtttttcaattaaaatcaggtacaatctgttgacttcttcaaacaataaagatttcaaaccctttaatcctaaccactgagagaagagatgctaaattttggaaatattttaccatgtaaaatcatcagacaaagagggaggattgcaatgcttatctattttgcattattttatgtccttaacaaaaagcatagtttatgctgtaattatatatttaaaattaatctactagactttttactttcatttttacatgaatgtatacactctttagtatatgtgtatatatttgtgtattagttttcatgtattattttattagcattttattatttcttcattaaaaatgttaaccttggttctctcaatggcattccatattcttgtatgttaccacttttcatatataagaaaattttgttaaattcaataattgaaataaaatggccacattgctatagttacaactggaaaaatttagagaaattgtaaatatctatagtctatctcatctcttctaaaattgtactctgttcatcagtgtatttcttcagctttcataatgcatgaaattcatatagatttataaatctctacttatttcctctgatcaatttgtatcttgctaacattattaatgtgctcttttcactgttctgcaacacattactgttggaaagaaatgccatcggtaccttctcatttcattaatgaacatgtaggtatacagctgtctattgattttatcctcctaactttcagaattatcaccttcagctgaaaaaaattagaaaaaaaattgagcnnnnnnnnnnnnnnnnnnnnnnnnnnnnctgaaatgtttttttttttttcttggttgttagaattaaccttcatacggaaacagaaattgaagtatcagtgacactgcagttgtatgtttcattttggtaataaatctcaatagctataggtgtctctgccaggcactagtccctacatagtttgtccaatcccaagtggtcatccttgaacacatgcacatatgagctacatgtactcggtagattgtgtgtgtgtgtgtgtgtgtgtgtgtgtgtgtgtgtgtgtgtttaagattagtatttttggtatcaatgaaatacattaaaattttcctgagacatcttacatacatagtgggaaatattttagaaatgaaatataaatgtattttaactgtctcaatagataatatgtctagaaattgctttggaactttcactactacaatgaaactagtctattattttgtgcaagcagtacttggagcttctcaacattcttgtaaataggtagctgattattattctggagtgttcacctccttgctgtaagcatgaaataatttacagctgtaaatgatgtaaaagaacttgcagaagtttcaacaagttctatagcatatgctctcaaagagcattcgcattatactcatgtacaatgcatccgaaatgaaatagcaaggcaagtctcttcaatctcgccttaatttaaaaacaaaaccaaaccaaaacaatcctgaattcaaaaggatatgtgcagcttccagttcattgtctcgtgacaatgcgcatacctttcatttcactggaaatattgaaaattcaaatacaaagactcttgtttttgtttctcatggctattgccccaatgctgcacaccagagagatgcatactagcagaaagaatgagtagcagctacaggcagttttggaaaagcagaaagcttattatgcattcccctctctgcatcttaacacgttcttgtctttcacttaacattaagaagaataaataattaattattctgaagtatataaatccaactagtgaagactctactacttaaacactaccataaactttaaagacatgtcatcatagttaaataagcactagagtaaaaggaaacatcttgaattctatttttaaatgttctgaaacacacattgtactttggtgcatattaggtgaatattatgaaagaaacactgaattctgaatgagtgggatcaacatattagacactgagtctctgctagtggcttattaaaggacaagtgggagtaggtatctcatgaaaggactttttgaaataggcaaaatgattccaaatatcttnnnnnnnnnnnnnnnnnnnnnnnnnnnnnnnnnnnnnnnnnnnnnnnnnnnnatggatttgcttttgttctatatttgtttttcatcagtctgcccatttgcttgttgtgtttctttcccaacataccagttgcagacagtctgcatctgtgtgttatttccaaaccatttaaaaaaatctagattaaggttaatttgtagacatgttctaaaattgtcgtatttcaagtatttccatggtgttctaaagcttgtaatgtttgaacaatttaaatccttagctctgatttttatctcccttctcagattcttcacatatatttttaaaacattaagctctaatttgcccacactgaaaaaatttttgtactttctttacttgtctaatctttactcatcattaaagattcagcttaaatatcacttcctcagggaagccttccctgtcctcccaaatgagttctctataatctcctggatgtctcctttaagcacttaggataattaaaatgaatattggtttatatctgactccctatcatcctgagaacaaagactaaccattcttattttgagcagtctgttcatccaatattcaataaaatacatacttggtaaatgaatatacgaaaatttattctgtttcaatatgcaacatatttatttatagcagagaaagccacatagcccttgttgtcatatgttacaaaacatgacacaagcctaatttgaagaatattaaaatggaaatattttgaggttttaaagccaaagttagagccttagctatcagttcaaatttggataaaacatgttccatcatgagtttaattacattatagtttcactaactgattaaatgagaaaataagtcatgctctaccagcatttcagagaaaagctgaggaaaaaataaaaattctaattatctgagaaagctatcttaaacagtggcgagaaagactaataaaaacacatggaagaaatttaaaatacagactaaaacataaatgaggttcataatttcagagttaagaaacccagatttaaagaaacaaaagctgctattaagtagtcacttcatacctcctttttacctaggtaggctaaaaacatgattgtattctaagcctgccagttggttgtttcagactttcatctttttgtttttttaactaaaaacattccatttcaagtttgccacataaaatccataacacaacaagcttggctagacaaggcaaataaggtttgaggggtttttgtgtgtttttatgcattttgtacattttacctcatttcctttaactggttaaaagatgaatgaggctatttgggttttttgttgttggttgtggtttctatacctatcctttgtgcaatgttattagaatctccaatttgtgatgaagagaaagtatctattaccagtggaaagtcttagctgtggattaaaatgagtaagagcatagggctaaacagaattttatcaatactgtttcgcctattattttcatatatcacataaggtgacacaagtaacgtattcattcttgtataccactatgcaagctgaagtttctcataatcattttaaaagcacaatttttcaacttcaaaaataaatctatggagctagaacagaaatctttactaagttgtcaaaagtaagcactaaacatttaaatctagaatatgtgaagtatcatatgtgtgaatgacttatcctattaaacatcacaaagcagaagagctttcaaaataaagaaccaagaaaatgctatattcttaattgcaattaaacaagcctcaatggcatacatacttagagaaatagcaaaaataaatgtttcatgacaggctgagtagtagtaggttcataatactgaagaaagttttacagttatttctggaaagtgaaatcctacaatagagagtagtaagacttggatgttaatggggtaaagtatctttggaatgaatatacatgaataaattaatgggaaatggcaaattctctaacaatagttccaatgtgataattgggagaaaaactctatagtccttataggcctgctaagtttatgaactgtgttggtttgaataagaatggccccataagctcatatatttgaatgcttaggggtggcactatttgaaaggtttaggacatgtggcattattagagtaggtgtggccttattggaggaaatatgtcagtcaggggtgggctttcagtttcaaaaacccaagccagtctcagtctctctgtctgtgtctctgtctctctctctgtctctgtctctctctgtctctctctctgtctctctctctctctgtctctgtctctctctgtctctctctctctctctatctctctctccctctctctcctgcctgaagatccagacgaagaactcttaggttgttatccagcaccatgtctgcctgtgtgctgccatgcttctcaacataacaatactggactaaacatccaaaactataagcaactgtcatttcacagtaatagaacactgtctaaaatgaaaaaaactaaaaaaaatacctaaaatcaagcttgatgatggacaagagtatagattatgacttgttattatgtaatactctaatatataaaataaatactctaatattacaatttaagcttataacaagttaatttgtgtctataataacgcctatttagattttcctataacaattacttataaaaactgttccaaaaccaggtaaggtggcacccacctttaataccagcactcaggaggcagagacatgggaatctctcggagattgagggcagcctggtctaaaactcaagttccaggacagccagtgctgttacacagagaaaccatgtcttgaaaaataaacaaaccttccaagtgtaagaaaaatataaatgcatgagccatcagcaaattacctacagtactgtttcatcgtcattcttaccttctcaaaccttaaaagtataaaaactaaaataattcaagtaaaatgaatgtattcaggatgccttactggaaatacaaaggctaacagacaaagtactttaataaaatcttgttacacacaaaaaatccaaaaagtacttgatggggaatgtctttctgtgtatgtttatatccttattggttgttgaataaagtactgttggccaatgaagaagagagttaggcaggactaggactcaaagaggattttgggaaatgtagtaactactcttcctcctgctctcttctctgctctagagacaccacgtgatccgccgccaagagagggcacttactaccggcgtcctccataagataagtcttatgattatggttgataattaagactgagctagcagataagaaatcctgatcattggcctgcagcattgtaccctacaagtctctgtgtgttgttttgggggtcctatccggtggctaggctcagtcagcatggtgtaaagactttacaagtactttaataaaaaacttgacccctctttatcttttgcacaagacaacactggtcatccatgggtttttcgatgtgaacaattaattaaagcaagctttttttaaaaaacctaatatctgttactggcaaaactgcatcttccatttgcattggaactcctgtgcagtcaaaactctccaggaacagttacagaaatgtcaatttatcaaacacataattcactagaggataatgaaccaaatgtagtacttgtatcaggaatgatttagggatgacgtaaagcacattcaatgaaactatattggatgtgttggcagaaaaaaaaatgaaaatggtgaggagtcagatctctaggcatttggagattctctcccaacctacttctagacttaatccatcagaatttctattctttaggagaaacaactcaggcaagtatgttaactttcctctctacctttctcacaacagagctcacttagaatcccagttccctacagctgtacaaggaacaattttgatagaaagaaaatgtttcccaatcatgtcaagaagatgagacaactcaaagttcatagaagctctgagaaacccctaaaagtaatagattcaacatcatttctgtaatctgatcatgaatatatactcaaaaagtcacttaactacaagacaaacacttcttaaaacaattctagtaagattaatggatcggtcacatgaagttaaggaatggattccagaaattatacctagacgagatcacctaggcagctatgtaatctggagaaaattgcttaaattctcccttctttggtttagagaaaacaccttctttggaatgttctgacaagtaaattaagcaaaacaattagaacaatgtttatttcatagtaaatgagcatcaaaagtaactactattattattatctaactaaacttttgtaaactgtatctgttaataaatatgatggcacatttttctaagatagaagatcaaactgatggaagtgtattatgtaacattataatactactatatatactaattatacaacataacaatactatatataatatataatactaatacatttaatagtaatataatgtaatataaaacattaaaagtatttgatccagttggatatattacttattacacaagaagaatcttgttaaaaattagtaaatacaaactccaataatgaaattaacacaaaatccctaggtacagtttttttctgtgttatttcactggaagagctgaagtagaaaatgagaaaatgtcatatatgagttcatgatgtataacattattttataaagagattttctggttatttgatagatgtgttttaatcacacctctgtgtggatatgtgcagatattgcaagtgcctgtgaagaccagtagagggaatcagataccttagatctggagttacaggaagatgtgagccacctgatgtgggtgatggaaccaaaggaccttttggggagcaagtattcttgatttctgagctatccctccattttgtaaagaaatattctgcatttgtatgtgtgtcccgggcactaaaagaatacttaaatatcaagcaatagaaatgttattgtattctcttggataattgtgtgttctaagtgaaagtagtacagactcagacagtttggggcagtagttaactttcaatccaaaagtattccaacgctgtggtaacttcaccatatattaacaaaaatttttaccaaatatctgtacttctttcaaaaactaacaggtaagtaaatagagacagtggataaatgagagtaggggggaaagcatcgtgtttaaaggaaatactgaagaagaaaataagatagcaccactaagtgtaggctcactctattacataaaatatgcatctcagaggaaatcccctacaggtgagaaacctaggagaataacaatcatgctttaaaaaattaaagatcttttaaaattcctttaaaaggacaagatttcctgagcaaattgggagcatgggttgatggggagggagggaggaggaagggagaggggaggagaacaagaggaatcaggaagattaatctaggcaagggaagaatagagtaggagagcaagaaaagagataccttaatagagggagccattatgggtttaaagagaaatgtgccactacagaaatatccagagatctacaaggatgacaccaactaagatcctagcaatagtggaactgctactttaaatgccttcctctataatgagattgatgactaccttaaatgccattctagagccttcactcagtagctgatggaagcagaagcagacacccacagctaaacactgagccaatctcatggaatccagtttcagagagggaggagtgatgagcaaaggggtcaagaccgtgctggacaaacccacaaaaacagctgatctgagcaagtggaagttcatgaacccctgtctgatagttggggaaacagcatgggactgaaacaagccccctgaacatgggtgtcagttgggaggcttgggcagtctatggggcctctggcagtggaaccagtatttatccctagtgcataaacaggctttgggaatctattccctatggagggatattctctcagcctagatacatgggggagggcctaggccctgacccaaatgatatgacaggctttgaagattccccatgggaggcttcaccctccctgaggagtggatgtgggacaggggttgacaggggacataggaaaatgggagtgagagggagcagggggattgttatgtaaaataagattgtttctaatttaaatttaaaaagaacaaaattcctttaaaagtacattatacaaaaccaaacagccattatctgaagtgatagttataaatggataatattccagaaaatatttgatggtcagggaacaacaaatgacagttgttagcacttaaagaagctaagatttaggataccagtctctctgacttgctctgatccccaaaactctggtgaggaaaaacaaatgttgtcactatcatttatcatttaagtgtctctcaaccaagaggctctgccctttaagactctctttaaaaaggcaggctaaggtaaaagcatttatcataatctttctctattccctaccttccccccaaaagaattatcagtaatgcagacatgaaaattactttaaaagcttaatgttgactggttttagtaaatggtcaattcactttcaaaaggatcaaaatgcctcaaattgtcaaagagctcaaagctggtatccattgattcaacacaatctttttacaattttctgctataaaatgtgcacattgttaggtattgtcaaaataaaggtctggaatatgccctccaatatacaggcatcacagcctcaagttatacatctcaggttagtggaagaagacaaaatagcatctggcataaccattaaaatcaaataatatctccatatggtaagtaccagtttcatttaaaatgactgagaagtggaagaacaagggcccaatcctgttttctctccttaagttactaacttcataccataccatgatgagagaggagggtaacaataagtcatccacatgtttttgttattgttttattttaacaatgtctcactatgtaccttggagagttatataaaccaaactctcctgtaatctgtcatctactagatgcaaggggtaaaggtggcatttgcaaaacatttaaaccatatatttctaaaagtaatacaaaagaatatccatgagataaatggttaagaatagcacaacttacctaactttaagtatttgattactcataaagtgcataaaataaaagccagggcctgctattcagtgagtaactacatgtgtgaaccactttgtaaaggagttttatgcacattgtatttacttttatatcaacctgcaagataagcattgtcaccaacattagagacagggaggcaaaagtgaatcactagtagccacacaattattaagaagtagagacaaaggaagcattaaggaaaaggaagttggaagtgtttaagtgttagaagatctagatatggactaagaactatcattccctagacttcatacagctatcgtaattattaattaacatcatcttgggataatatattatttatgacttactaaagcttgcctgaaggttcagaatgcaaagctagccacaagctatagaggcaggaagtggtaatacacacctttaatctcagcagccatactagcaagctacagagccaggcagtgatggcacacacctttaatcccaggactcaggagataggcagatgaatccttctgagttcaaggccaccctggtctacacaagagtgaagagtaatggagttcatgcctttgatctcagtacttgggatcacaggcctttaatcccaacactaggaggtataaaaggaagaagcaaagggtctcatgtggagatttagttaacagacaggaagagcatttgcctctgaggaatcctggagccagatcagccctttcagcctcagatggaggtaaaagctggcttctttgcttctctgatcttcatcttgaaccataatatctgaatggatttttattatttgtgttacatcagctatagttatctgcactggattctcacaaaaccaggcctattaacaataaatcaaggtggaaggggggcggtccctaccctttaactctgaactaatggctatagatagattctgggaagggaggaaaacacagactttagctgtgtatccttctgctgagcccactagtctctgatagacagctccacatccatagtcacataggtggccctggttaatcttggtgggtcactcaacaaaaatcatgaaatatgaatgttagaaagagagctggggggaggaaaggggaaaatggagtagtagagaggtgggagatgagagtgattattatttatggtaaacatgtgtgaaattataatacaatattttaactgaaatttaaataaaatagagtcaaaaatgtgacatagatctgtcaatttccaaaggtcacatatttttgttactattcttcagtgccttgctttaactccattcagtgttgtttaaggcagtcagtcgagaatcaaggcatagtagactagcaatcatttacttaattcttttactgatatgaaatgtatctcatataattaccccttgattgtatctactcctctgggcctatatggaaatctaatttttttccatataagcacttttctttattatttggaactaactatgtggctcctcctgtaagacttatctgtatagattacctttccacacacaaaagaagcatcagaaaaccatagaggtaggagggcggcaccaaaggaaggacaagacaaaggatataagagctacaactacgatagaaaattctctctcaatgatggcttagtagcatttttataattccactggacctgaacattttagcaatcacaagaactgtccagcttaagagcaaaatgtactattttgcagaagtcaagtttgctatatcaagtcaattgtgattccacacagatttcagggtatttaaatacaggtgccaatatggttaagttgtcttagttattgttttgttgctgtgaggagacgccatgagcaagggcaactcttataataaaagaaagcatttaattgggggcttgttcacagtgtcaagagtgttagttaattatcatcagggtggggatcatggcagcatgctggctggcatggtgttggtgcagtagctgagagatttgcatcctgatcagcaaacagtgtgacactaggcctgtagtggatttttgaaaggtcaaagctcactcccagtgacacatctcctccaacaaagcttcacctcctaatccgtctcaaacagttccactggggagccaagcattcaaatatatgagacaataagtgaattctcagtcaaactaccagagacatgtgtgtgcatttgtatgtgtgtgtacattttacatattagacttttaaaaaatactattgaaaagcactaaatatataattagaaaatatctgcactattgaagatcctatatttttaaatgcagaacataaataagatttgaatatttcatcactgcttgctttgttacatgtgtaaaatgaaaaactaaaggaatgttaacagaattgaatatgcttatacactgactttagtgtcaaactaaactggttaatattgaaaacttcataactactcaaagctactcaaatgagaatatataaagtgctactgtgaaaactcaaggcttaaatgcattaactgatgctggtcaccagcaccaggaatcccccatactcaaatataaagtgtatttctggttgactttacagttcatttcaaataaaattaaagtacaaacacaaaggtgaaatataagaaacatccttgccatatccaggtccgtactatgaatgctaaaggcacaactttccacataagcaataatttctagtttactggctttaaaagagaaagatgggataattgtgagtcatctcatcaagaagaaattttggtttctcccatgtgtgtagctagcaagtttgtctttcctatgggtttggtatatatgccaaaaagctagccataagctgccacctgagtgggttcctgcagcattccagccttccagtctcccacattggtgcatgtagtgtctgttccacctgagacagcgccaacttcagctgcttcattctggcaacaccatggcctgagtggccctgacaatcatagctatgtgtatactggaggacaccagttgaagacaatgatggtccaatgagtcctcatggaagcagaggggcacagaagacataacccagtgtacagtaatagaggaacttgaggtggctcaaggcatcccacctgacattttgggaaagatcaggtgaaacaccttgaatgactatatcctctcactgaaggaacatggagccttcctggagacatagtcctggatagaccccatggtgcactgccagatagttgtccttctttgatatatgacaacaagtcagacacatgttctccattagggctccaggcagcctgtggcactaccagtctggataatgtatgctgtgatgtgcttatctaaagacaaggatagaatcaataaacttcttccctaaggacaattaagggctgagacacttcccttggcttctgagaacacacccactactgattcttgagtgagagcctgccatttgctgtttctatcacatagggggaaacgcagacattctgctgcacaagtttaacaaaatgccctgatgaactataacacataatcagcttcagtaaaccattcctccatttttttttcgacaaaccaagatcatcccagctgatcagcttaagacctgccaagaatccatccttgatggctctaaggagcattccccatttctgttcttcccagtcaggatggttgaataaaaggaataaatctggtaatgtgttttgaagaggtttggcatacatgcctgactgatgtacttggaactagtagttcagcaatacatggacttcccaactatcaaaggcaaagcccaccaagttggctattatcctgaatttattaacagcttgattttactcaacctagtagttagatttaggttgggctaaaaggaccaatgttattttaattcggtcaccaatttgaaatgtatccagcgtatatttgaatagtgatgagtaattaaatatttctgaagacacaaattatcgactaataaataatattctgtgtataaaggacacattacaacaaggcatcttccactgcagtttgaaaggaaatcataatgctatcccataatatttacaatattttctagtttaaaatctggaaagaagtatgaaaaatttatgacaggaagacaaaaatctttttataaggagaggtttttgccactaaaaatgtttaatgattaactgcctccaggataagtggggccagcccacatgtaaacccagattaatgacaagctaagaggaaatatgttttccttaccaaagtgttttaaaataaatcttaaaacattatttttcatatttcataactaccacagaattacaactagaatgttaaaacctgctagcttttaagcttgtgtgtactgaatattgtattcagtgtctgcagtgaatgggtgtgtaagagagggctaggacactgatatgaaatagtattcccactgcagtatgcagtaaatttccctaggaaaaaactgcatgtcaacagaaatctcctagtcttatttgagtttatatgctctacaatccagataaaaatcaagcaaccaccaaacagtgtagtggttagcaactagacaaagaaagccaactaaacatctagaaattcagccttcatattacacatatcaacaaatactttactattcacagatttaatttagaatgacgtttataatttccttttaactaaaggccagtcaaaaatacagtcttcttccttaaaaaggattaaattaactgagcaaagaatattaacactatttaagacatgtcataatgtcgatcacgtctttaaattctgcatttaagctactttgcctcatgaaaaaataagccattatacctatgtgaatctttaacataactgaaaagaaaaacttatggtgatttaaatagctacaatgcattttcatttagtatgtgtcaccaagaattgtgaatatatatcttctctgcttactgatagaacagttctgaaatccatctttgtactagtttttgaaatacgcctgataatataattaatggaataggacatattacaggaacaataccaaaattactcacttggcatatctgaaggattgtatgctctcaggaagttagagaagaatgtatttaaatgctcttctgccacttatgttgtcatttcaaaaagtgatttagcctcttgcagcctcaatcacaaatctctggtaaccaacctcacagggtgatgaaaggactccctgcattgagaatccaatgctagttttatataccttttcaaatgtgctcagatatttgtaaaaccctttccagtcgacatattattgacatgctaagtagcaaaagctttcacacatccactggaagaggatgcctaatattctctgccagcaatgctcttagcctattctcaatcaccaagctgccttcaaaaaggaaagtgtaattccactttttgtttttgctaatttacaagtttttacctgtatagtcaacttttaccaaaacacatttcctatcagtacaatatcagtcgtaacttttacaaagtttaatacgcactaacatggaaagatgaaaacagcaatacaaactttgggaaaggaagtagggctttcaagaagtgcctatactttaatactagtcatgagtttatcatccctgtcagttagcagagaccattgctttctacacccaccaaagtatatcttccccttaaatgtgtacatttaaatacaaggaggcattcttcattcaaacttggattccaatttgaaatatgatatttactaagtaggcgaaatggataatgcaatcactttacaaagctggatttcctctctaaaatggaagcactccacaacctatagaatattattgccaatactacataagatcatgtacacaaactacctagttggtatttaatatgtgtcattttcctcacatatgggactgctcagttaggaatcccgaaccaattcccatttatttccaaaggtgcaactgcgttcaatatagtatgcttatatccagcctacaaatttactatcagaaaagcaacagatggagaactaccacaggaaatacaagaaatccataccagaagaagcattgcgaggacataagaaacagtattctaacagaagggaggggctttatgtgaagcaggattgagactgtacctttaagaggatatcatggaaaggggcagttaataaaaaatgaaatgatgaacactggaaaaatggtacagcacactaggaaattatgagtgctaaatgcctgggttgtggaaagtgttcagtatggacgaatactaggacaaatggtgatagtgaaaagatgcattgtacaactaagctgctaaggactatgtcttattgttccaaaataatactaaacaatcaacaaggtaataacatttatgcttaggatggcactctggtttctctttcttaggataaggtcaacgaaagaagaatccagtttcattcagtcccaagtcctttcccaatttgtcctaatgaacagtcacatgagaaggttaacagggaattttaaacagcacgaaagtagaaggcaagactatgtatatgaatagaacacacattgcaaaagacctatatagtattgtaaatcagtaaagaagacaggagatgattttccatcaagagattagatgagtaattcatgttcaaaatgcaaagcaaatggttgtgattagtggaactttcaagagaatgtagcttaaatgattactggggcttcaacaacatagagattgcatttgactatttttcattttcatgtaaaaatacctaagcctagtaggaaatgtttacaaagaaaattgaaagctacagatcaagtagctttggttcagcatccaatgaggtctcagggcaggaagacatgtgagaaggtgtcatcatgctgacaaaacaaaccagagatcttgctcttgtaagaacatggtattgaggagaactcattctagagtccataagaactttaattcttgggcatatacccaaaggatgtacaatcataccacaaggacatgtgctcaactaagttcatagcagcattatttataataaccagaatctggaaacaacttagatgcccttcacctgaagaacgggtaaagaaaatgtggtacatttacacaatggaggactactcaggagaaaaaaaaatgacatcctgaaattttcaagcaaatggatggaactagaaaaaaacatcctgagtgaaagtattcacttataagtggacattagatgtaaagcaaagtataacctgactacaatctgcaaccccagagaaactaggtaaaaaggggagtctaagagggacacacatgaagagccccaggagggaaaaatagttaagatctcctgggtaaactggggagagggggtaactgggaggggatgggtgatggaaacataaggaatcaagacacagttgggggagggaaggaaggagagagcaataaaagatatcttgatagagggagccattatggggtatgggagaaacctgatgctagagatataatcgggaatccacaaggatgaccctgctatgactcctagcaatggagaggctgtccaaatgggccttcccttttaatcagattagtgactaccctaattgttattataaaacctatatccagtaactgatggaagcagatgcagtgacacacagcaaagtgctgtgctgagttcctggagatcagctgaagaaagagagaagggatcatatgaacaaggggttgggggatcaggagctgcatgggggaaatcacagagacagctgaccctatctagcgggaaataacagacactagactgacagctgaatgtgggtgacagtgctgtggcttgatctgttttggggatccctggcagtgggaccaggacttatcttggatacatgaatgtgctttttggagcccatttcctattgggggacaccttgctcggccttgatacaggggagagggtcttggtcctgcctcaacttgatatgtcagacttagttgactccacaaggaaggccttacacactctgaggagtggcaggagtgagaaaggggaggcagggggtgggagaagataaggaagggggaactggtgctggtatgtaaagtgaaaaatatttttttaatttaaaataaaagaactttctttataagagcaggtactcaaatgtcctaaggtcctcctcttatatatgtcactacaactttccaggataaccatgctgaggaccatggctactgcacatgaatcactggtgaacactctcaacctctctccaaactataacaggagcttcagatatttactaaaagaaacaacacagggatggcaaaatatttcagcaggtaaaaagtgcttgatgcacaaacctcatacagaacctagagtcaatcctcagatttcacaacagaagtgaagaagcaactctggaaacctgtcccctgacctttgttccaccacacacaagttggactcacacatacataaacacactcaccatagtaaataaaaattgtccaagaagcaacatcagcacaattgtcatttttgataaatgatctccattcttacatgtcatgggaaacaaaggaaaattacatctctaaaatgagcaagcaaaaaaggaaaagaaatttcagaatagaaagaaatccatgagaatcaacttattgcaaaacaaaaggcctttaatgaatctagtctttattcctcgtgtacaaaaccaggaagtcagtaagacaaattatgatttttctgataatgccttagtagacaagcatgccctcctccacaggaaggatgctagcactattcttagtgtatcatttcatcaggaacatggggatagaaaataaatcaggacttgaggtctacactgccaaaccaggtagcctctggtcacaggcagaagcctactacttgaaatgcagcaaggctggaattgaaatgtgctataaatataagatacacagcagattttgaagacttagtataaaatgatgtgatgtatcttttcaataattttacattgactagatatagaaataaaccgtattattaaaatgaactttggatatttcttttcacttcttaaatgtggtttctagaaatttttaaattacatatgtggcttacattgtatttcttttagacagctctgctgcagatgaaatttttacactccttctggtaggatattctatgctaagacttcactgttaaagtctaaataggtcttgcatctttgtcggagtaatgcaaaaatctaaaagcagatatccaaacaaagtagagtgacactgaataccaacctgatattaattacctctacatgcaaaagaatattatcagcatcaacactcattttgagaaaattaaatttaagtggattacttaaaagcatttggactgacaagaagaaagaaaagttcatgcccaaagtaaaatattctttgctgcaattaaaatctcaagttaatggtgaacctaatttgacaaaaatcaggtgtctcgttgttttagtaatttcactgtttttgaagatactccctggcacagaggtaaaattaagtctctttaaattacaaatagcaatgtaccattttctcaattgtaactaaaccagaattggcagggtaacaactcacagagatcctataatactttatgtctggaataaagacaggactcgtttgaattataaaaggtaaggacatttaatactaagctatagctgaaaggcaaatgcttgcacaacatgttataggaagggagaaacattcatgtacaatggggagactgaagcatttagggaatggacacaataattctctaacactgaacaaaagcttcagtactggactcaaacagtttaaatctagttggctcaaccccaaatgccatgttcttaagcaccacatatatcatcaaagatgtaaatagatataacttctacacacacacacacacacacacacacacacacacacacacacacacacacacaaacacaccagacaccctgtggtcaaattgcttgagtaatttacaactgcttccttatgaaggggtccaggatacatatttgcaaagttatactcacctgcatccttttgccctgctaactttatctcatacatctcttctgtataatttatctgaagtatgtctacatgagcatatcttagaaaatctgacactgacactgcatataatacagatatattgtgcaatttgagaatttttctctcctcccaatttacaaatgatagttatattcagctattaggattcaaacacagaggtaaaattttgatggtaaacagtagaatccaaattttctgtcaagagaagcacattctctgatagcacatttaaacactgacttagggaaattcattacaattctgcataggcttagctccaatattagaaacatgcctctaggctcatttatacaagaatttcttattcagcatctcagctgcacaggtttccacacagaaatgagcaggtacaaacggttagggcttcataatgagtcaacattaacataattactttccatttcatctattacagtacactgtttgactctctcatttcttttcatttcaatcattcctttagaacacccacaaggccctgttaaagaaatgagactttagaggctgtgctatagaaactgaggtgagctaaatagttttgtaattttcccttagaaatgatcaaacgttgcacactaacagaaatggtgtggttttgtactctactacaatatttctatctcttaaaacaatgtatacaattagataatgacacgaaagttatttactctgccatcacaaaatctgagtataaaataagaagcctattttgcttgtgaacaaacagaccttaatctttcaaagttgtgctgtctaccacagttatctcaggggcaatgtacttactataattacgttgccactgctgaaacagtttttgaaaagccttttttggatgaagaaattatctccggggatagtttatccaaatatacatctcattgctttatattttaagggcagggcatgatcaattcgctcatttatcaaatgtaaagccaaaaaattttgctattcccaaagattatttccacactccaaagatcaagatttactaccagcacaagtactcaacagaaacattacttgagttcaaaataagccccaagctcaccacagaggaactaactgggtagcttacttaaattcgcagtcagaatcccccaacttgaaagttgaagattatagtgtctactgccaggcacataatgagggaatctggtaaataggagcatgtgaaatagtagtagcatggtgcctgataagaattaatgatcagtaggaaaatatatgagacccaggtcccagcaaatccctgatccttagactctacactgttcctgaatggctagccccagagcctcaaccgagtaaaagaaacacatcctagattccgggcctgagccaaagaaagaggcactttatttgcaaatctagcgccagggaaaaacaccccatctctgaaactaactctaaaagaataaactttgcccctagaatcggaacctgtaaaaaaattctcccaggccctaaaattggagcctaacagctaaaaagaaccacagaaagaaacacagtttggccctgaaactacagccatttttgctcctgacagaaaaccagccaatccttgagcagggaaaatcaaccaatccctgagcagtaaagtagttaccctcagcctatgggtgtgaacgttccagcccagggagataggggaatagtaacctcaagtctagaggcataccctttcctgaccccagcttagggaagtagtacactctagtgtgggagcaacactccccatagattttaaatctaggaaagtagtagcccctggttgaggtgtccccctgtccccctgactttagcaggaggcagcctcttccaatctgtcaagcctgactgtccctatctttccactgaccctagcccatggaggcccaccagaaaccagcaacacctcaccacaaggaagaggccaatcagaaatgagtaaacaactccaggtgcctgccttatgagacaacaatgttgcaattttccctagacgcagtgcagccaaccagcccagtccagatacccgggtttgagccaatcccaaggttgtaactatgcagttttggaaggcttcagccaatcccaaggctgtaactatgcagttttggaaggcttcagccaatcccaaggctgtaactatgcaattttggagggcttgagcaaatcccaaacctatagctaagacaatttggagttcccaagcctctccctcctgcctggctactatataaacccccttctctctcttctctgagtctctccttctctgttcttgtcactgctgctgctgtttcagaaagaaggagggacccgtgttaacttgcgaataaagactctatttttgcattagagtggatctcaaggttatgattcaggtttgtggtttggggcttaacatatattgtatttgtattgtagaaaacaaagtttaaaaatcatgcatacaaaatctaagaatggtcacagttttgatgtactgacaatgatcttttccaattaacacaattattctaggtatatgtccttctacccgcaataatcaaggaatatcactgaaggaaaagacagagttcagggaagactagaggaaaaaattcttctaaatatgacaggggtattgaactcatgaattcccaaatcatctgtgtttgcttacacaaaactaacattacagcatgcattgaggagggatacccaagacccggccctatctgaaatattggcagatggtcttgagagaagtgagtcaattttatttatgggtgtggtccctggtaagttgacaatgctgaagtggatggcacacacccatgagtatatgagctgcagcactaattagacacaatgagttataaaaaaaaaaagtaaaagaaaaaggaaccaggaagaaattgagagttcacaggtacagcttccctctcaataatatgattacctgaacaagaccaccatgacaataccagttgacttgccaatatggacagggaaattccacatcattctacccctagatgttgatctacttgtgttgaatgcctgcttggaaatggagaatcagtctccttcaagaagtagctcccacataggctgtccaattccaagtggtcaaacttgtatacatgtacatacaagaaaaaaataagtggactcaagttaacacgggcccctccttctttctgaaacagcagcatcagtgacaagaacagagaaggagagactcagagaagagagagaagggggtttatatagtagccaggcaggagggagaggcttgggaactccaaattgtcttagctataggtgtgtgtatatatattatatatgtgtgagtgtatacatgtatatgtatgtgtgtacatatatatatatatatatatctgtatatatatacatatatatgtatgtatttctgtatgtaacagtaataataaaagaattcattcattaatttggaagtcgggacacaggaggagttggagtagaggttgaagtgacgtagatccagtggtcatgtgtaaagttaaaaaaaaaaaaaaaacaaaattaccaaacttaaaaaacagatgaccttggggtggctggagagacggctcagaggataagaacattaactgcccttccagaggccctgagttcaattcccagtaaccacatcagaacaatgtatacataatgataaaagaagaactgaacttgggaacaggatgtggggtggagggtggtggccagggaagagttgaaggggaataaatagtttgtatacatttctgaaattttcaaaaactaacctgaaatgtgtgtgtatgactaagtttcattcgttcttaaaagtagcatagaattttataaccaaagtccattcctcattttatttaaagaaatgtaatcaaaatttaaagcagctgatacttctgggcacactatatcagtgaaagagaaattaaaaactctgcttctctccattaagaaattaattgcttatttgtttttacatgtagtcatgtctagcctttcatgtaaatctgggagatttgaactcaggtccaatccataaggagttacaatgattaaatatttgttgggtttctttctgtactttgtccaaacctgaggactcattattttacctggaagtttgtagctgctctttcagatacacacacacacacacacacacacacacacacacacacacacacacacacaccaatcaggatgtaataatatgtaaacatgttaaactgtgaagatatgtataaaggtcatttggaaatctgtcattgcctaacatgcctgatacttcacattttcatatccacatttacctaattaaattaaaaagtaattaaaggtaaaatggaaaatgcctaaaatactaattaatatcgtctcagagaaattactttattttggcatgtaagaaaatgtaaggaaaaggatacatcacatatgtgtattttattttttctcagttttacctataatatctctatcccttactttaaatatacctttaatactgcttcaaataaaattaataatgtctgtaataggaagttgagaaaaacagagctatcatgcaaaataacactttgccgttcctcccttcctgctctgtaatgagtatgaagaattagtctaggtcagcctgattacttagcctatcagagaaaagaagaatagttagtcattaattatattcattaaattatgcaaaatctgagacggttttgctaataaactaaagtataagtagctatataattatatggaaatcaatatgcctttgagaatggtcatttatcaagagaaaattcattccatatccaaacagcattttatgagtaccgtaaactcttgataccaaaaatttgctaaatcattagattatacaaccctaccaggcaagaatttagagcataaattgctgcctggctctcaaggtctttaccatagccatgggtaagatgtcatcatcaacaacagtggagcaattacaaaatctagctcgctgatcaggtactgtgtttgcacaccacctttcttgtacaacagaaatccttctatagatctttctgatttaactttagacctgataagataaggaaagtgtgattaccaaattcccttagctgcttctcatagggaaagtaaaaaaaaccatcaaacatgaatttccatgcaaaacagcaatctttaggggttttaatgcagttgtgcagcctcctccaggagccacaaaagagaggagagaccatgttctttgtttcagagactcattgtggagcgcatgaaatcactttgtacagtaaaagcacgtcgagcctaccatgtaataattattcataatcatgttttatttctcttaatttctgggatatatgctctgaattgtatcagttttctcaagactatatttataaaacttcttttcctttttctttctcaagagtacattttaatgtacaactgaagtgtcacatctatttctcagcagagcaaagcagtaaaatgtaaatttccttgatataaagatatcttgagatttttattccttatacacattgtggaagacacgaattaactccctgaaggtttgctctgacacctacctgcataaatagcacatgttcatccgcacccacacaagcatgtacacatagaaaactacaagataaataagtaatgtaatttttcaagagaatctggaaacctgtgtatgagtttttttcactatgttgattttgatgtgtatgtggacatcaatgtgtggtcattttcttaaacattaattatgcacaagcagctattaaaagaaaacccaaaataactagaagcttgaggagtggaagacgatgacacctatttcaaaatacttcttcatgatacaacccaatttgtattcaacaaataaaaaataaaataccaaggaaaacaagtgtatatatctaagacactacagaaaaatgttagaggacggtgatctctaccgacaagaatacttctccaattatttgcaggttataaacaaccatatgtctatatttctatcaaagtaacttgagaagaacagttaaataaaacttctaacattatcatttaaaaatcatttaatactttactctccaagaagtacgaaaactaaaacttctgagctaagaaaagctctggaataactgccaggaacaaatttataaggtcaggcaaagatcgcaaatatttattcagaaatatattatgctacatgtcatattactatccaagtacaaagtgatataaaaatatttctgtggtctgctcatacaggcttttcaattaactacccagaagttttgttactaggaaactttggcatattaacctcttctaccatttttcacccttcagcattgagcttgaaatgggatgtatctcagtggtagaatgcttgcccagcatgtctgagtcccttgctttgatactcatcatcatcatcatcatcatcatcatcatcatcatcatcatcatctctctctctgtctctctgtctctctgtctctctctctctctctctctctctctctctctctctctctctctctctctcacacacacacacacacatacacacacctcatacacacacataaaaagaattattttacttattaaatttcacattgataatcatacttcaaaaattcacttagtagaccctgtacacaccactcattgttacattagttacttctgtatttgatatatattacaaaccatcccacctcaattaaactgtaatagtatttgctatgacctcttaccaaagtatacatgaggcagtaaggaaacaattgtattttagctatgaaagtaatatgtgaatgttcaaaagtaaagcatatgtcagggtataatgtaaaagacaaatgcctcaccaggcattgtgatacatatctataatctaagctgcgctacaaagaaaggactagcataactgggctacatagtaagactaaatacatgcacatgcatatacacaagtacacaagtagatgacacacacacacacacacacacacacacacacacacacacacttgtaatttatacacttccaagaaaaaaattattaaaaattttatgtaggtctcatactgtctaacaggtctgtcaaggataccctaaatatataatggtgatcccattatgactataaagggccaagcagtggtgatgtatacctctaattccagcacttaggaggcagaggcaggcaggtctctgagttctaggtcagccagatctacaaagtgacttcctggagagccagggctaagagagaagctctggcaaaaatcaaaccaaaagaaaaaaggaaagtaagactgtaatagactagaaaacttatcacctaggtatataaaatataatgtattgctaatgtttgtggtaatcttgatataaaagaaaacctattataatcctacttgtatgaaaaaacgacaaatacaaggatgtaaaatacataagaagtggctattcatggattataaaactgctataatatattattattgttactatactgaaaactacttattaatcaaaagttaactgtaaaacaacattaagcaggattttcaggagttaatctaggagaaggcactgttggcagtggagacagtgaatgttatacatgttattcacctatcagccttccatgagaacagtaagtaggtcacagtggtagatgttgatattaaattgaccttgtctaggcctgggatagtgtggttttgcattttagcttttaaaaatcaaaatagtatagaaagaaaatacattaaaaataagtacactaggaagtctaagtctaggtttgtctaagaatactatagaatattcataggacaatgggaccagataatgccatatttcagtaattaaatgatgcatgatggtatatacatccaatgaaactattcttgttactttgtacctttattcctaatatattcctaatattgttaaagtgtcactcacccaaatttctgctgttcctccttaagaggacaggattgtgtttccctcctccttaaaatcagatgtagctaggcacaggagaccacttcctaaatagaacaccagtagcacagactctgagagcaacaattaataaatgggaacccctgaaactgagaagtgtctgtaaagcaaagaacatggtcaacaagacaaaatgcgccccctacagaatgggaaaagttcttcaccaaccccacatctgacagaggactggtgtccaaaatatacaaagaactcaagaaactagaaagcaaattgccaaataattcaataaaaatgagttacagatctaaatagagaattctcaacagaacaatctcaaatggtggaaaggcacttaaggaaatgttcaacatccttagtcatcagggaaatgcaaatcaaaaccactctgagattctaccttacactgatcagaatggctaaaataaaaaacaccaaagacagcttatgctggagatgctggtgaaagtgcaaacgtgtacagctgctgtggatatcagtgtggtggttcctcagaaaattagggatcaacctacctcaagaccctgcaataccactgttgggcatatacccgaaggaaggaggcacattcacaccacaaaaacatttgctcaactatgttcataggaacattatttgtaatagccagatcttggaaacagcctagatgtccctcaattgaataatggataaaaaaaaattggatacatttacacaatggagtactactcagcagtaagaaacaatgacatcctaaaattcacaggcaaatgggcagaactagaaaaaaccatcctaagttaggtaacccaaaaccagaatgacaaatacagtattactgatacataagtggataccacaaataaagcaaaagatacccagcctacaatccataaccccagagaagctnnnnnnnnnngtcatgtgtgtttctcttccagaaacagatggaagcagatgcagaaatccacaactaaccaatgggccatgttcctggagtacaatcaaagtgagggaggagcaaatatatgaacaaaggagtcaagaccatgatggggaaactcacagaaccagctgacccgagctattaagagatcactgactcaggtctgacaaatgggtaacctgcataagaacaaactaaactccctttatataggtgataatggtgtgactgagacaatatataaggtcactagcagtgggtccaagacataacactaatatacaaattttatatggagcccattctatatggagaaataccatgcccagtctagacacaggggtgtgggggtagagacatgcctttgtcctacttcaacgggatgatgggacagacctagtagacttgctaggggaggcctcaccatctctgtggagcagatgggagaagggggaattgaagggaatgggagggaaggagggaaggggaactgggattagaatgcttaaaaaattaattaattttaaaaaatacagcaaataaccaaagtaaaaaaaaaaacaaatcagatgtagttctctgatgtagccaatgcaacatgagtataagtgaaggatggtctttcctaacataagtagtaagatgtcattcagtgtcttgttcttcgttttgctatatgtagagcataagatcctgtatgagcataatatgagccagagaccttcagtggcagatgatggcatgctgcattagcagaaaatagctgtgacactgagatttgaagtatgctctaggtcattctcactgatagcaaattctaaaggagattcgcatctgcacatgcccaactacctcattaactgagacacttccaaaatagcactttgatgagtgattattctaatttgctggatcaataagtagactgtttttgtttgcttggtcatttgtatcttttggagtttttttctaacataccaaaactagtgctttgaatgggtttagatgctactagggcttgaatgtgacttttcagggagttggtctacaactggaggcattgttttagaagctgcagaatctttagcaggttgcgcctaactagagaaagtgaagagcaataatcaagggggggttagggttataattcaactctctaccaccacccaccctctatgcttcttggtttggtaccaagaaacaaacagctgctgcaaactccctgatccacagatgaagccccagttgccatgctttccttgccatgatgaactctttcctctcaaactgtgccccgaaataaatccagtcttcccttaacatgattctgtgaggtattttatcacagcaaggagaaagtaagtaacacagatgttaaagtacattgaattctcacaagtctgtaagatacgctctattcttacacagttttacagataaggaaagtgaaccatatggggattaagctgaaattgtccccaagtgctcagagatagtaaatggcagggccaggacatgaacccagccttgactttacagccaatgcctttaattgcgaagtatattgctcttccaattttcagaaaaacagcaaataaacaggaaagtaaacaataaacagtaatagctatgtggaccacattttgacagagaactatgtggagccactttatggtgggaagttaggaacagcatctttaaggaagtaatgcttgagacctgaaaaacaagaaaaagtcaggcatggaataagacaagggaagaagtattaaaaccaaacgtatctgatagtacaaaggtcctaggagtggaaatgacctggcatattcccgaattaaaaagggtagtgtggctgcagcaccctgaaccaaagataaagtaaagaagacgtggcttgccaatgcactactgagggacaagattacatctgatattcttgttcatacatcttcacaaatttgcattcgacaaaagcagggaatgaatctcaaggactggaattattgcgccaaattttggaaggtgtcatgaaatttccctctaaaatgataacaggaaagaaagatggtgctaagaaaaacacagagcttgtctccctccatcacactaacatgaagcatttcaaacgtctggcaatgtgataggttttcagaaaaggttatgtcactgccgctgctttcatctacatttatctaattttgcttgaacttaaattgtgtatacacacacacacacacacacacacacacacacacacgtatctatgtatgtcatgtgtgtttctttagttgtgacctatccagaggcaaagaatgacatctcttaagttggaatctcaatttggttacaattgtttttttcaaacaacaaattttgtatgttaagaccaggagccctctgtcatattttcaatctctactgtagatgaagatcctcttatcactcaaattttaatgagctcaaaacttctttgatcacacactaaattcccatgggtattacatctactgttgggtctcctgtgtcagtaatctatttgtctactcgtaaaagagaatcaaactatttaattactactcttcaaatgttctcttccaagtaaaatttcaggagtggagacatggcttagccattaaaggaaaggcatgcaatcagttaaaatttcacatcttgttgtcagtccctagaaataatcctatagaaaagttattgatagtgattctttcttattgttataataaataagactcacatttgttaatgactgcttaggtcactatttgttatgcattttatatctattatcagatattcatataattttatgtattcctttataaagtatatatttctctaatcacagtggcaaatacacgttgtcctctcctttcaggaaaagagggaaatgggtcaatactggtaaccctggtaacaataaacatcaagatattgcctctgatcttaaagggaattaattaagtaatttctcagtatgcataataactatattgctttcaggtagctacatttatcatgaaaaaataattatttttgtattatattaatatatttattaaaaacacatgaaatatatcataggccttttgctaatacatactgaagtattgttaccatatttgatttatatacaacacctatcatctgtctcccatgaagaacccaaacataccacttaaataattttcttcagaaaaatatggtctcattacaccaaattacacatacatatttgcaaaaatagctatggttctctttcttattctcataaatcacaacaatctgtctgatgatgaaaaggggagtagagcagaagattagaaatctccatgatgtaaaaatggaattaaaattttacaacaaatgaaataaatttcccacactcatgggatactagtgtcttgtgagatacttataaatatgtgtaatgacatcacctaagatatggtgtagtgagttaactacagataattaagcattctatcatatgttacttcaaattatgtatcatgacaatgtgtactgtgattttctaaagaagaaagaaggttatagcatggaaaaattcactccattaccaaccaaacaactcctctatccatttataacaatatcacctgaacccttgtatccaaacacaactactatgttcttgctgctggtaataactaagacccctaccagacaaagaaatctccctctgacaagagaaaatgaagctgatgcagtgagaaatgcagagacgagaaaagcattagttttccagaggctacctgacctgggatgccacagctattctaattgtaaatagagcatgttcctctgtagtgttgtgttctaaaatattcttgtttttaaatcaaatttcaagatacataaatgatacaaagaacaggctttgcaggttgcaataattttgaaagtataaagggtccttaacactaaaaatgttggaaagacataattatttttttctatgaaggctttgtccctctcaaacaattctttttctttcccctgaatattctccttccagttcttttaaggtgttctttttgttttaactttacatggtctattaacttggactatggtttaatagaatataacagatacaataatcgtcctttgaaatagcatccttaacactacgactttgctattcacaatatgctatacgagatcttcattttctctctctaaattcttagctatttctcccttgctcaacaatagtatattcaggtgttttcaaaagtattatacatctcaaaaaagctgaggagcagctcagtccataaagtgcttgctgtgcaattatgagggcctatatttgctctccaggtcccatagaaaaagccatgtgtgttggtgtctatttgtaatctcagtccttggaaaaaatagacaagaagaccatagggctcactggctagtcagcctaacctaaccagtgagttccaggccctagactgttgcaaagaaaaatcaacagccaaaattgacctctgaaccccacacaaatgcaccaacatgtacacatatgtacatttacatattactgacacaagtacacagagaaacatgaaaactaaatgaggttactgtacagaaactatagtttataggtatggattgaaaccatgaatacactcattgattaatatacattagctgataccttgcttttttcctggaaatgttctgttttaatacatcactttctatttttatgcaaatattgaagtaagaaaattagtccccaaatgtgctctttaaaatgtgggcttaataaaaatattatgtttcatgtatcattaataactattctttttcaaacatttaatcattcccccatgtaatccaaatactacctctttccatccaataatttgcattattctactttcagctatccagctctatgacttgggcaagatacttccccttaagagaaaggtcacattgggataaacgatgtattccagctctaatatgctgtcacatcagtcatgtgccataccatctcagttggtctaagccagtggtttctcaacctgtgggttgtaacccctttgagtgtcaaaagatgattttacaggggtcacctaaggccatcacaaaacacagatatatacattacaattcataataacaacaaaattacagttatgaagtagtaacaaaataattttatggttgggtgccaccacaacatgaggaattataataaagggtcacagcattaggaagattgaaaaaccctagtctaagacaatctcatgtgagacaaactgaatgagagagaatgctcagtttatatggaagaacacagattgactctgccctaaatggcagttactcagcactagcaaactgatattaacatgctataatgattgttccattttttatcatttagtggtgtcttttttttgtaactcagtactctgctgctacaaatacctgagataaaaagaatgtaggaaggaggggaagtggcagggaataagggaaagcaagggagggggaaaagtaattataaagaaggaactatcattttggctgaggtaccagatgattcagtccctagtcagttagctctactgcttttgggaactgggcaagagcaaagaacaccaatatgttgtaaatgtgactgcaagaaggtgctcacattgtttaccaggaagctagaagagagagaaagaccacaaagactgctcaaggacctattttcaacctggttctacctccaactttccaccagtttgcaataaaaaaatagtaaaaaaaaaaataaggaaagctaaggtagtcatctaataacaagcttttgagatttttgaaatgaaactttcatctgatttggaagacactagaaagtatttactactagtggaagaagggaaggtttactgtcattacatatgagaaacacttaccaaactagtaaatacctctcattaagagaggcacctaagcaatacaattgtgctagctggcatgcagcatccatttgtaaaatgtggtacacattcatttttaagctttccataaataattagaggactcaattcctcacaaatgcaaatccactggcatttttcctgaatcactcatgagatgtatcttttgagaaaaaccaaaaatgtggaagaaacatcatgaagatcatctgtagggnnnnnnnnnnnnnnnnnnnnnnnnnnctggtcctttacaacaacacaggatgttatcatctcttccagattacataagccaaagataacactatgaagcatttatttgtctgtttttgaagcactattgccatgaacttagacaatgggactattatttgtaatacaaagagcagatgggaagatgttaccagctaccagacttgtttctgttttactcttcacatctgtaccacaccatctcatttccaaacagttcatcatttaagaacatagaatctccctcacatgagctcttctattttctatgcctagtgctcagttaaatttcatctgtttgcactatttccccttagaaggcattgcttttactttcccagtctactaaaaagagacaaaatccacccaaaaactatttctaaatgataattccccttgaattgacaatcattatagattctctaaatacaacatcccacatataaagttgaaataaattactaatataatggtgcatcttaaattgaaaactagacatgatgaaagcaataaggctatgagatggaaagtatcaaggaacacagattcctgttttcccttcaagttaataggatacacattgaacatacttatattgcttatatctgaacttattaacagctccttcatccctttccactacatcaaaaaatagaaaatatatttcttgttttctgaatgaaatggaatttaaataatagctcccttggcaaaaaaaaagacagagatggagaatttattaaatttgtaattgctatatcataaacattatgagaaaataaagataatacaatctaagtacattatcatttatttcctcttgttttattttaaatcgaatatgtgtacattaagggaaatttagaaaatatagttaacacaaaatacaaaaataaaagtcaccatgttttctcatctgaagagaatttctattaatattttgtcacataatctatcctttttggccctgtgcaaaatatttttaattgatttcatactatatgcattttctgtttaatgtgttctgtttaatatgtaatgaaaggggctggagagctgtctcagcagttaagagcacttgtttttgcacagggttcaattcccagcatccacaggacagctcacaactatccataacactgtggtatatagacatatatagttgcaaaacactaagaaacataaatgtaaaatattcaatatgttattaaagtatcacatacaattaagtatatagaatatcttcaattatgtaatagtttatcaattaacatgtaatgacttcttaactcatttaaaacctagatttttttttactatgagaaaaatgtaacattaaatatccttagctatcatttttgctcatttccttctttgggaaatttttctagaaagagaatttggggtgtcattataaacatttccatggcttctattttcacacacaattttctttcaagaaatgcactgtctcacaaatcatccactattagggtattaatttcttcagctgtataacaacaaatacacaaaggtattcctatattatcattttttctaaatttgcttcaaattcaccacatgttcttcaatactgcatattatttacaaaaggtcccctttcatatagactagaaataagaactattttcttttaacacttctatttttatttctccttttctaaagccttttgtagcctccaatcaaatagcatttacctggatttctccctagtgtgtgtgtgtgtgtgtgtgtgtgtgtgtgtgtgtgtgtgtgtgtttgtgtgcaattttaccttcacacctagcctctcagttgctctgacgagtatggagaaaggtatgataaagtgaatctatttctagttttccaaagactttcttgattttccagcaatgagttgatcatttaaaatattcctaatgatttctgaagtgagcagaaggtaaactttcaggctctcttgctctgaaatgtgtcattaccacaggtacaaaagcagcagtcgttgtgaataccagcatgtttagctccttgcctccatacaataaatattacaatgtatgctcaaagatatctaaactattcttgaactggcaccttctgattaatcaaacagtactagggaacaatttctaggctcagcttccttttagtcacatgtacagtcgacagcaagcaagaaggtacttggaaggtaagtagagaaaagcacatcattgagaaaatgagatctaatattcttcagttttgattgctgtcattacataacagttatgtttacataattgagataaatttacaatataaataccatttaataggaatcggaaggattcttaaagccagaaaatgtccccaattcccatcttttataaattctgtttcctttatcggcacagggttccactatgtagacctggtgggcctggaactctctatgtatgccaggctgacactcaactcagatctacgggcctctctctcccataattaaagatatgtactaccaagccaggctgtctttcagaaaatttaaatgtattttatgatctatatgcaatctaacaaagagtagtatagaaacttgcacagtcatgactaagaaattacaacttggtgttatacatcatgatgtttaaaagcagtcaaaacaatgtatttgacagagaaatctgaaagagacaagaaaattttgcctgttgtgagccttgagtgtgggagacttacttgtatgtacacatggtttacaaagccttagaaaaagagttaagtgcaaggtggtggtggctcaagcctttagtcacagcactcaggaggcagaggcaggggtatctctgtaagctagaagccagccaggttccaggacagccagggctgttacacacagagaccctgtctcaaaaataaataaataaataaaaagaatgaaaaatttcaatgtacctttaaaatgtttttagagtgaaaatagcattttaagagtcaaaattcagacccagtacaagtattagtgacagaaaatttgtcagttacatccaatctctcattttcgaagactacaaaaagctatgtatagagacacaaagtctcacaatgatggaaagatgagtgatactagacttaatattgaaaagttacatttcaaccatagtgaaatttgaaagaattcatcattaaaaattaagaagtgttcatacattcctttcagtgtttctcctataatttcaatctttaataacagctctccattatatagatttgtgctttccagtttcagccatgcaagttcaatagcactatgaaatgcttaatggaaaagtcataccaataagcaatttgtgcattttggaccacctgtattgtagtagtttttacagatgtactgttttactcttagttcttgttaacctcttactgaacctaatttagaaaccaaagtttgtcaggggcatgtaagtatgcattggaagcacagaatacatctaaatgcccagctgtctaaggggccaagcgtccacagggaggtcacagatttcacctccagtagaaaagaaactatgggacttcaaagacatgaaatgattgactcagtagacgtgagacatgatctgatcatcattcactgcatatcatgtagcaaatgagaaagttctagactcctgtctgcacagggactctgttatgaggtccgtcacaaagcactctgtatcaccacatgtgaagacatgagacactgagatggaaactcatgccaaaggttagtcagctctacagcttcacccggaggaaaaaaaaagagcaaaggataaaacaaaacaaatatcctaatatttgaaaaaacaacacttttaaatcaatttgtacattggccaaataggcctggcttctgattaactgtgtgatccttatcacatggtccacaaacagctttcacaatcataccgactttcttcctcttctgtcaccatgttaatgtctttctaatgttaaggtccttttaaattaatttcaactttcctcttagcctgaaagagacttcctattcacatggctaatctgttcacatcattcagctaacagatatccctctgacaacaggcttctctaagtgccaacattttccattcaatacacagtgccagttatgccggtatataaaataggaatataaatcaaatatagactgatgatattattgccgttaaaaaaaattgggtaaagcaacagtatagaacccagaaatgaactttctcacataaactcaactaatattgtacaaaagtagaatacacaatggagaaagaatagtctcttccttaaatagaaacacataatagaaaattattcagccacataaaaggaaatcctgttatattctataacaaggataaatgggagaatattatggtaactggaattagctgacagacaattgctatagggtaccatttacaggatgtacccaaatcagtcaaattattaatcaattaatcaaagcagaaagtagaaccgtgggtgctagataatgagtaagcaaaaaggagttcattttcagtgattttattcagtcatgctacatgaaaaccctttgaaaatatgttgtatagcaatgcatctacagcaatcaattttcttttgcatacttaaaacattattaaaagtgtagatctcatgatatgtgtttggggcacaatactcacatgctaaccacattaaaaagtgcaaacacagattgctactctgaaataggcaagttgtttattttggaagaaggaggtttctcttcagttatgacatggaagaaaaacagtctaggaataatgagatattctcattaaataatttgtaatgcagtgtgcatttaagaggggacagattaaagaaaacatacagtcacaaaaacccatccatgtgcacacataaatatatattcatgtatatatacacacatatagatttatatttatagacaaaattcacaggcataagtgctatggacaaaaactgagagagacaggaagtgtcgtgagggaagattgtaatttccaaagggatgatttgaaataggcttcatttgagcaaagctggaacaaagaatggactatggcaaagaggtatcctatatagtggttattaagtctgcttacatttattcatcatatctgaggggactgtatgtgcaaaccactcagcagatgaatattatagctaaggatgacacagtaacatttgaatcctttggtgatatgaaggactatgaccggaagaaacaatccactctgaaaaagtgctctgcctgggcttttgtgtgactgtcacacaggcgttcagaacagaacactgccaccatcgcgctagctctcatgcaatctgactcagactgaaaattctcatcaccttcaacctgaaccgagttcttgtggagcactaccttctaatgtataaatagaaagagagagaatataagaaggtttatggaaaatctaggcaaagcattgtataggtattgtaatagtgactgtttagaaatattactcctaatgttattattatctgttgagtggaataattgtgggtgtgtctagttatggaaagaggatggtagatgagatcttagtgtggccttcaaatcacacagtataggaaattatcttttccaattacgcagaatctgcccttgtgctgactttctccattattcaccatcactgtaactgagacacacggaaagcttaggaagtgaaatttgaaaagacagctctttgttccactgttgtcacctgccattggaataaatacagatgtgcttttagagaaggtttggtgattgttttctttaaaaagctaatattactaatttctgccacagatagtattctgatctatctgtggaatttcccatttacatatatattattttgctggtatttttctcttttctattataataatccaccagcgagattcaagtaagaacacccagaattgttttaccctaagacaattgataaacatacaactaggctgatacattagattgttacctaatgacttttggcaaatgtatcacatacccaaagctacagtttcatacaaaatattttcactctcctaaaatttcacagtctctgcttatttgtccatctatccctctcccctcagcattaatcttctttgctgtgctcatattttgccttttgaagtgtgtcacataattataattgtacaatatgtggtcttttcagattttatggcttgaaagccaatttctttttatcactaaaaatcccattgaaggacatcttgttgcttccatgtttggacaattattaagaaagctaccaaaaggtttaaagagatggctcagcggttaagagcactgactgctcttccaggttcaattcccagcacccacatgccagttcacaactgtctattccaggggatctggtatctggcagaacaccaattcatataatataaaaaatcagtattttttaagagaaagctgccaaaaacattgagtgcaggttttaatgtctctgtctctgtgtctctgtctctcactgattttgcaatactgaggattgaaactagagcttcctgaatgttatgcaagtgagaactctcccactaaatcacatccccaggcctaagtgcaggtgtctgcatggacagaagttttcaacccaattgagcatatgataagagtatgtttagttttgtaagtaacaatccaactgtcttttttatttctttctctccatttttatttaaattagaaacaagattattttacatgtcaatcccagttccctctgcctcccctcctcccctacccccctgacaactaacaccctacctatcctataccctttagtcagcagagaaggaggagtgatgagcaaaggggttcagaccaggctggtgaaacccacagaaatagctgacctgaacaagttggaactctttgtccccagactgatagctgggaaaccagcataggactgatccagacccccatgaacgtgggtgtcagtgaggagacctcaaatctatggggcctttgtagtagatcagttcttatccctagcataggaatagactttgggagcccattccacatagaaggatattccctgagcctaggcacaagggggtggccctagacactactgcaaaggatatgacagattctgaagacccactatggaaggcaacacccagaattttaattttaaaaattgcatttcattggttatagctgtatatgaccccagtgtaattttctgttttctgttaaagtagacaataccgcatgtaagttgtatgttcatctatgcatgcatttacgtgtatgcacatggatttgatgtgtgtgtgtggggtgtgtgtgtgtgtgtgtgtgtgtgtgtgtgtgtgtgtgtacatgcattttacgtctgtccccattgaaatctaaatacaagctgttaaaaccacacctaaaatacagaaagggccaaatatatacttacaattttgcttaatttctataattacaaccaggggatttaccttggtgtgatgccgttctaggttgtatatccaggaaggataaagtatttcagtgacactccaactccatgagataatggcttccatatttgaaagtaacaatcttacaaagcagacgctttcctcaaaagatttaagctaaacttggagcattatcagtgtctgcctcgaaagacatgtttttttttttcttattatccaaagcaattactttttcaagatgataatgatgacttatttatgttggataaattatttttaaatttcagcatgtatttataactttattttaggaacactataaagacttgaacaatggccattctttaactagaatgatctatggctacatttctctaatctataattaacttgcccatctaccaaaattatggttgtaaaatgatttacatttatagaacaaatattaaaattcatagtatttcatatttagaatataacaattcctttcctaaaaaaggatacataaagctgggcattggtggtgcatgcctttaatcccagcactcaggatggcagagacaggtggatctctttgagttcaagtccagcctggtctacagagtgagctccaggacaggctccaaagcaatacagagaaaccctgtctcaaaaaaaacaaacaaaaaaaagacataaaatgtgaagctttcactcacctttcatttaaccaatggaaagaaattattttattatttgctaattttcagtgcttaacagaacacttctagattctctgtttgctacatggtgaatctgggaggttgggactttgatctggtgattgtatgggaagacatggacaggcaattatgattataataaatttacttcagatattttaaattaattttatttaattaaaaaccatcttattttacataccaattccagttacctctccctcacatcctcccactccccccacaatcccctatcccaccacccgtccactcctcaaggaggagtgaggcctctcatggggaatcatcaaagtctgtcccatcatttggggcagaacctaggccttccccagtgaatctaggcttagagattgtccttccataggaaaggggctcccaaagctgacagtggaaccagtatttattcttagtgtatgaatgagcactttagatattttaacttgatgagagttagggtctacatggtaagactgcaaagttagttgaaagtctaaagataaaaatgttggtgcattgaggcaaggtagaaaattcatcctttgaacaaaatcttcaggaatcaggcaaaattattggggccgaaagatatgaccataagaaaccagagaatataaaccagtaagtaatatcaaaaagtgtgaggtaaacatttgagaaaagactttttgggtttagactctaaaataaagttcaaagacaacattcaaaagaccattaatagaggatgtatgcagaaattatgctatttaatatgtgcatggtctccttttttctctacgactacactaatggtactatcagtcatatgttgacaataaaaatcagctcactctagaaatcatacatactatggagattttaagagactaagaataactgattaaatcagagtctaccatattatataagattttccacactttcttttgatttgaccaaatatacattaatattcaggattactaatggtatgacattaaaatgaaaacatcattatatactgtctaatatctaattagtcaggaaaatatcttggaaaaatcactattggtacaagcaatgataagtttatttactggtggagcattcaattaatctatggttttagaaaagttttcaacattcctacttgaacttaggcttgccctatgatatataatttctatatgccaaatagaaatgcacattgatgtataaaagagcaaatgttatgaagcttgagagataacttagctactaacagcattttgacttcttgcagcaaccacataacagctcaaaactatgtttacctcaagttccaggggatttaaaaccttctcataacctctgtggacaccacatgaacacttggtgaacagacatcaaagcaggcaagacacaatgcacataaaataaaattactgtaatagtaataataataataacaacaacatatgttgtaagagtattccaggtaaaaggaaaaacaaatgcccgcctatagctcaatgggtttgttgactgtaatctaatcatacaatgaaatctcccactataccattcatttctataccatctacagcagtcaacttgaatgtttgtgacagagactaatgtgccacagaacctacgatatttagcatctatccttttctagaaaaaaatggctaacttcaggtatagaccaatatttttaatttcaattatatgaaacacaggaaaggccatcacaaatccatgaaagcggatgttttcgatgttaaattttaaaacagctgaaaatacgagtattgtaaagcaaattagtgcttgcatttgaataggtcaaaagaattgagaagtgatttcaatgttcatttcttaaattgagtgttcatggcacagacatagacattttgaaataactcatggagctgtagatttattatggggccactttctatgactttcatcagtaaatcggctcttaaagtactaagagggattatcataattagtcatccttatagtataggatgagaagagtgaattttttcactatacatacttctataaaacttttttggggtttggaaatgcaaaatcaaagctacaaaatagtacatcattaaatataaaaatcttcattgttaaatacttgtctgtttttgtcagcattacctaatacatttagggtaattaagtgacaatcaacattgctcagtatttagggccaacaaaacaaaacccaatgcattgctgctacgcttatatgctatctaaaaagtccaataatcttgtgaaattctcttgctctcttcgtctcatttttaaaatacagtcttaattatctttgtcagactatagctgttctacatccactatcttcagtactacagtgcatgaacatgatggtcttaaccatccccttgagctaattctcctccttctcaacgagataaaagacttcaggaattgaaaatgacattaaaaaaatggggccggcatcgagcaattgttgcttaaaataaagatttaagaaagaagtgttttctgcacaatttaactatggcttgctgtagcaaagttcttttgtgtgatgtctaatacaactccctagagtgcctccttgcaacaaaacaataatgcagaggttttgacaaagtgcccatctccctattgaggggtcattataggataatagctgtctaaactatataattcaatatctagttagtattagaatatctgttaatcagttttggaagctatgatgttcaaaactcagaacaatatgtaaaaccttccttgaccaaagggaatgactaatcttctgtatggctttgataagttacaagaaataggtttatctcagaagactggttatgattaatatgcagttcgtaaagctccttagctctgtatggtctctctctaaccgaatctaataaagataggtcacgcatttttcatattcctttttcacccatgacagatctctaataggatttatatgcatttgatattaattgtattggggactgcaccaactgcaataatccttcacttctttgcctttttaaagctatacataaattacaaaagtttccacttttgtttgactgcagctctttgcaacgatcaaccatattaatgacagagaggtagagaaagatggagaaccaccttacctagttcactgaaaggccaaattagatgaaaggctataaacccagctttgagagctgtttagctaccctctctcttgtgtcagaagagctcgagtatataagatcagtgaaagcctggcactctgaattggtgaggaaaggaaatgcttttaataaccatctcacagaggagtactggcagcaacctgatgaagtattgcttttctaaccatctacagagacaacacaggaaatgtaaagatgagacagagctgcctagaatgaaaaactgagtgtcctggggactcgacctaaaagagcgcttaattttagctctgaactccaaagagccttcacttatttcttggagaaaagaaatgcatcttgtgagactattcaaattaaaattgcagttaagagacatggacaattatattttcatattctatactccccactatgacataaagagttgaaattttcattctgcaaagagaggatagcaagggatttgagaaactaataaaatgttgctttacactctatcaaaacacttagctatcagtgaagaaaatccagtggaaaaaaatgtaggtcacaattgtaatgttctttctacttcaaagagactacacacaaattcagcatgtagacatctctcatagatgtagtcatcttttttaaaaaactaaatggtatgacaggttaaacttgaatgatcatctcacagatttatacacaggggtggcggagtgggacatgtaattattgtccctacattaagaaagtttacttttaaagtgtgacattaaaggaacaaatgaacaccaattcaacagtctgttaattaaagagtaacaagcaaacacacctcattcaatgaaaaaaaaccacacgaggcacttctacttctggccataaacaagtacctgttagtagactagccctccaactgtaaacaaacagaaaatcagagaaaatacatgaaacaactgctttcagacattagacaacaggctgcagagggctgtgatccctgagagaatggaaacaaactaagccagacgtccagtgatccaggctgtgtgtgtgtattttccacagtgcagtgcaaggtaaggacgaagcacagtactgcggcggagctggaaaagagaaatgggagaccagggagaatggcgcagctttgatttatgaagcatagcaccagagaacactactagagacaggcaagacagtctacttgagataatgctgactagcaatctgcacaaatataaatgcgactccattagaaatgggcaaatggctcccagagaataataaattcaactactacagttcgcacagggctgagacatttgtgctctgattagagtgaagagatctcaccaagcctttagagcagtggttctcaacctgtgggttacaactcctctggggtcacatgaccttttcatagggggtcacctaagatcactgggaaaacacagagatttacattatgattcttaccagtagcaaaattacagttatgaagtagcaaagaaaataattttatggtagagggtagtcaccacaacatgagaactatattaaagagtattaaagagtcacagcaatatcaaggttgagaactgctgctttagaaactagaaaaacaccacacttcaagagtgcaactgaattagccatagaacaagtgttattttagattcatacaagcaaagctttaaaacaagtcttaaaattaactgatgggcatataatagaaatttactatttgaggcaattagttcatatagagttgcagcatttaccaagccctgaattaaatctgaagtgtgcttagaaaaacaagagacatgctttaagatacataacttcaggaccaggtagtggtggcggcacgcctttaatcccagcatttgggaggcggacgcaggcagatctccgagtttgagttcagcctggactagagtgagttccagaacagccagggctacatagaaatatcatgtctcaaaacaccaaaaaaataaaggagagggagaaaaatatgcaacttctaatagttaacaataccatattcctatatcccacagctagagaaaaaataatatatttccaaatgagcaggaagttagtcagtggaaataaatgcagacagagataagggtaaagtcatgggcaagaactttaaagctattatttgtgactttaatatttaaagaaaatgtatatactattaagaggaatgaaactggaaaaatatggaatcatagagcagggaaataatgccccacctgcaactaaattccaatgtatgtgtttaatagatgatacactacagtagtgaaaagagtgaaatgaaaataagggtcatggaaagtatcaatccaaaccacacaaaaggaaaggaaagtttaaaaacttaggagaaccttaatgaaaggaggagcactacaaatcagctttctagcttagcatgtgagaacaacctaccttgccaggatatgggaggctgaggcaagagtataccaaatttgaagccagcctcaactatgagcagaatattactttcaaaatagaatgaataaaataaagaaataaaaatataaattgttcttctatagagaacttttctagcaaagtgaagagatagatagatagatagatagatagatagatagatagatagatagatagatagatagatagatagataggccaaccacttgatgaaataatgaaccatacttttttagatttgataaaaatccattaatccagaaatttaaaaatccaatgagcccaaacagatttaaacttttcataaaagaaaatgaaaggcttctttaatgccagtactcaggaggcagaggcaggcagatgtctgtgagtttgaagccagcctggtctacaaagctacacagagaaaccctgtcttgaaaaaataataaatgaaaggcttaaggtatggctattgggggcatgttgccctagcattcctgaagacctgagtaagatcccagcactgtaaataaataaagttacagttatttaacaaaaatattaaaagcatgtaggatgagaatagaagagtagtatccagaaatgatagcttgttacatagaagagaatggagcctaaaaatgatttctgacttttcattcatatcaatgaaagccagaaagaaatcaacacaggaccatatttcaaggatctaaggaaaacatatcactgaaaagaaaagaaaatatgttagaattttgtagctagtgaaatgtctttcaaaggttaagttgaaaacagtacagatgaatacaaatattcaatgcaaaatccaatgcataaatatttgtactatgagaaacactaaagaaagtaggtatcaggaacatactgaaagcccacataaagggataaagcattatagtagggtgcatttaaaagtgaagtatgtaataatattcagaccataacagaaggatccaaacttttggcactggaatataatgttttcatttctacaattatgcaagactgcattcatagctatcctgggatgtgcacagcctatgtgcatgcagctaccatgtttagtttatagtgtttatttttcttaaaacataaatgactaaaaataatacaatgtaccatcaggtatacaagtagaatacataacaacaatacaaaagtcaggagacaggcaaggctccaaaaaaaggcaaataacaccatttaacactagcctattatgcctgccagtggtagtgcatgcctctaatcccagcactctggaggcagaggcaggcagatcctgtgaattcaaggccaggctgatctacaaagtgagttccaggacagccagagctcttacacagagaaaccctgtcttgaaaaacaaaacaaaacaaaagctaacttgttttaagttaaagatcagtattatccacccaaaagtaacctttgaaagccataattaagaagcatatataataaaccaatagatgagcttttattaggtactttttaatgtacaggagggcaaaatgagttaatttagtaagtaatatataatcctacatatatacaagactagtaactgttttcaaaaaccagaagcaataaccaataagactacaggacaaacaggtaaatctgcaattatggtcactgacttgattatgcctcattcaataactgataggcaaatagaaaatcagtaagaaagtgaatgacttgtacattaccaaatgatagctaaaggatgtatacagaatgcttaaactgactacagaccttaacataatgttttcaggaatatctacaacattaaacaaaacagacttcaggccatactatgaaactagcttcatatccatgaaaataacaaagcttttatttaatttccatcattttttgtttttttgtggtgctaatgaaacaaccccctacctagcagaaactcctataagaccaaagagaaaacatggaggtcggcacaagtactactgctgtaaacatcagctgatgtgggagattgaatagcatctacaaaaaaaagttgcttatgtccagaacctacagatgtgatcctagttggccaaagggtctccataaatgtaattatggatctcaaaatgagatcaactttacatcaatctatcactatgttagcgagccataaatgctatgagaactaatcctgttaaagatacaaaagaggagagtctcaacaggaaaagcataagacaatgtgaagttggaagcagagacaagaattgtctccccagacacaataaaatggattttcccttacagctacttctggccttcagaaccaaaagaaaacgagtttccattgttttgctgcctgttagggccaacactagcaaatagaatcccataaatgagggtaactaatatacacatattaaagacacgtgttataacagggtgtagttacatccactgcagttcacaccagcttcaatttgaatggatgcaacttataccttcataggaaaaaagaattatttccttattttgaatttgccatggattgaacaaaaaatattttgctatttgaatgtttcttaatgaagttaaactggtcaactcttccttttacctgacctgtgaggatacagccaagtcagaaatgatactttatgattttttaaaattcatccattcaacataccttaactgaagcctttgtgtctgggtctactcagcattgaggtgctgctacagtgcatgtgatgaaacctaactctcaaggtaaaacttctaagagttggggaccactaagaaagggactatttcaagaggatggagctctcattaatgggaatagtatccttataacagacataaaatgggcttctttacctattctaccatgaggattaagcaaaaatgggtcatctgtgaaacatctttgagtcctcagtaaccaaaaacttcgttgaagccttgatctggactttctaattatcacaactacgagcaacgatttctgtcaatgatgttacatcatttgtgccattttgttacagaagtctgaataaactattacagatatatgaacaacatattgtttctctgtgtttgtaactcaccagctgtcttatatcaacagtttccctctggtttttaaaagcatggcacttaaatattttacagtccaccacattgttttttttaatatactcaaacattatttatgttatgaaagcacctgttacagttgaatgtttgtgtcttccaaaaatttgtatgttaaacccaaacaagaatgtgatttattagaaggtagggcctttgggaagcaattatcttttgattgggtcatttgggtacagtaccggtgatgaaatttagttcatcttattaggaaaataagagatagcaaaaattcttaacattgctatgtgatgaggcactgaaaagtagacagtctataaaccgagaaggtcttcactaaaccatatgtgctagcatcatgaccctagactctccatactctagaacaaaaaaatatttatcattgaaccagacaacatattgcattttcttcccacagtccaagatgactaagaaaacacacacacacaagcatatgtgtatatgcctatgcatgtgtatatctttcatgtacatcttttttctctaaagcagactatacatttggttaagaattgagattccatttctaccacataattttagcatccttactgctatgttttgcacataaaaatatataaaagcacaaaataacacacccgcagatttttccttagccttgatttataatcccctagttaagagttgagaacagggatattttttctgctctaaatttccaactttctgacataacttagcttgctgataaaataacatatggtatggctagcaacagaaaagactgaagtttctattcaagaaacatagatgttttcattaagatgtgaaatgattatgttggctacggggtgacagcagagtaaagtaaattcccaagactttaacttcaagtaatattttctttcctgtatcaataactcactctttagccatgaatagaggaatgtgacaaaagaatacaagaatggcaagcatccttttgcagggtcaaaccagggacttgatatcagatcaggatttgagttctgattccttccacaacgttttaggtaagttcctttgtctatctatctaatcttcatttccttcatctcaaagagtctgaatacaaaaatctgggaggattaaatgaattcagggtaaagggcgggcacatacagcaagtagccttttacaaagttaatttctacttctctaataaaaatggaaaataaaggctatgagcaaggactggagattgtacagtagtcatcagaagtcatcaaacaggaagatcaatggtcttagaatttctatttaaatgtaaaagttcaagttgagtgggtattcagggttacacaaataaaagctattttttatagttataactacagaaacaaaaaaatctacagaaacctaaaagcaaagaaatagttaggtcaattattatagattgggagaatgtatgggatcgtttcccaaagaaacagaggacaattactcaccttcctggaagttctacaagagtgttaataaaaaggacactggaaagaggagctgggggacagggggcagagttctttcttcttttcaatagtacctgcaaccaaactcctggaactctcatgcttttcagctctatttttctttcccctaaactaagctaaaacagaatctctattcacatcaaatggacctctaggtttggtggtggtggtggtggtggtggtggttgtggtactggtttggttttgatattatatttttgaagatggagtatcagccaacttcctaacactaagcaatactatggactattgaaaattatatacctttctatagcttgtcattgaaagacaatgaaaatatgctagtgattgacaatgaaaaataccatccaaacacaaaacttaatattgctatgcccacaacagtaaaatccaactgatgtttaatagattgtgatagttagctttgattgacaatttggttggttatatttaggatcacctaagaaatctctgagtatctgtaagggaatttgggggtaactgaggtagggagacatatactcaatgtgggcagcacaatcccatgggctggtgtcttgaactgaataaaaaggggaaaggggggacagtggtattcatctctttctgctttgtgatttggggtgaaattaagtagcctctcatgcctccactgccaacccatgccaccagaagagacttctaaaaatgtgatccaaaataaaccgttttctaaaattgcttttggtcaggaatttgatcacagaggtaagaaaggtaacacatgggagaagttctagtctcgtttcttgtttttattatacaatgagtatgacacgtatgttaatgcattgttgtttaagtgaagaaatacaaatacaaagaaaaactgaagccaaatgaacacccatcatagcatacacaatgggaagcaaaatgaaaatggaatacaagggagagcaaactctttctattcatcaatgtttctaagatttcaaaaacaggcttgcaagggtcttttcctctaactgaagccaggatatggtataaactggaatccaattgctaaaaaaataatttttattatcttcagtaaaatcctattgctgctgaaactatcactgtgtgtaacaaaactagtttgcataaaaggtagtggccctgtaacagccacattataaaggaattctgcttcagtatattatgtttattcattgacaagtatgcttttttcaaagcaaccaaactcattactaataatttaactaacacctccttggagcctaatttaaagtcactttcatttcaaaatgtaatgaaaccaaaataaaaaacattaccaggcccacacacataaacctattttaaaatagctaaaacttaaataaattaacattgaaatgaacaaactaagtctaagtctccaaagttacattaaatttacatactattgaaattatccttttataacaactgaagtgttaaactaactgcagtgtacactttcatacatatcacaagattcaaattaacaagaatattcaatctaatctgatagtaaaagtagccccaaacctatgttttacaagcagtcccagtttacatgattacacccttaaatctgtttgtaaatcagctgaacataaacacaaacaaacaaacaaaaataaaaacactggtacattttcccattaaaatagtttaaccaatatatttactcaggagatcttgttcctttccccttctggggggatctgtgtatgcctctcttagggtcctccttgtttcctagcttctctgaagttatagattgttggctggttatccgttgttctgtctaatatccatttatgagtgaatgcataccatgtttgtctttctgtgtctgggttacctcactcaggatggtttcttctagttccatccatctgcttacgaatttcaagatgtcattttttttctgctgaatagtactccgttgtgtaaacgtaccacattttctgtatccattcttcagttaaggttgcttccagtttctctctattacaaataatgctgctatgaacatagttgaacagatgtccttgtggtatgaatgtgcatcctttaggtatatgcctaagatagaattgctgggaaatggaaagaactcccatgctcttgtataggtaggatctacatagtaaaaatggcaatcttgccaagaacaatctacagattcaatgcaatccccatcaaaatctcagcacaattcttcacagaacttgaaagaacaatacccaaattcatatggaaaaccaaaaaacccaggataaccaaaagagtcctgtacaataaaggaacacccagggccatcaaaacacctgacttcaagctctactatagagctacaataatcaaaacagcttaatattggctagtccaatggaatcgaatcagagaccctgacattaatccacacacccacgaacacctgatttttgacaaagaagctaaaattatacaatggaaaaaagaaagcatcttcaacaaatgttgttggcataactggatgctaaccaaaatatttaattaccaagtctacacagaaagatatatttgagctataaaaacgtgtactatggtaaaaacaaagaagcaggaattcctgacccctttgcaaatgatggagtcaagataaagccttgtactttgctgttgtttggacgtggtgtgattggggtggaggttgctgtttcagcctttattgccaaagataccaaaaacaacaacagtgcattctatcattatggaagctggttccctgtctgcaaataagcaatcaaatattgctagaagagaacgtggcaagaaaaccatggagactactagtaaatatcaccaaaaacctcatttttatagctcggtgattaaaaataagggataatagtttgcaattcatttatgacagggagtttcccatactggaagccaaaaaaagaaaaaagagtcagcttgcatttgttgcatattctaacatccataagtaactgtctcctatagtaagtagagtaagcctaccttgctgtcttaccaaagtgctggggaggaggggcgtttagacagggagaacaattgagagttaataggtcactgtcaggcacacctgaccttggacattataattccctgttgtaaatatgaacctcttgaactgaagataataatgatcaccttctaagattacttacaataaggacagaatgagatcatccatgaaaaacttgtatttatcacaatccctaaaacacagttttaaaaaaaagtcaggaaacattaccagagagttgcctggcagacaggctgggatagggacaggcttttgtataatgaaacagacatcattcctctcttgtgtcataaaaaacactgccagctcaccagaaacatacattctgggaatatgtaaaaaaaaaaaaatgcttcccctcccaccagggttaagggaccttttatctaatttctagactgaagcacaatccattttcctacagagttttaagatgtccatgcctcatgaaaataattttttaaacaatcttgcaggtagcaagttatttcctttgaaaataaacctcataaatatttatgtgaagtcatgagagaacatgaaaaaatgtgtcccaaattacaccaaatatttctgcaatccttacttgttcacttggcatcattactctgtagttgaacctatgcatgctttttattatattaagtactaaggaaatcaaggatacctatttttccatgagctttcataaagagaaccaagtacaatggggtctttcattccccatacccagtgatccataaatgtatgatctgtatgtgagagcgtttttaaataaaataactaaaagggaagggagagaagcaatcttgatggaaacttttataaaaggtagtagacacaggctatactgctggagagcataatgaatcttctcttgatggcacctcagcaagatcagtttctagtgtttgtaataatagagtaacgcccttcaaaaccattgaaaacagtggggctgcttgtctcttggtacaataactaaagactactatagtttttatagttcttcctttgctgttagctgtcacatctcactgtcaataacatcttttttttttcttctcaaaacataagattaactgggtgaaagcctgagttgacatccgcaagtcactaagacatattaagtgtcttcttgtcccaaatttaagtcagaaaaaagggcaagtaatgttgcaaatggttgaaaacagaattcctgatttaaaaaaggggggagctacgccaaatatggaactgccgtaattgtagtccccaaggcattcatgtaaagccttgaaatcagcaaacatgttagcacataaaactacacaaagcagtaatcaaagatggttttctatcaattaccatggaaatatagatacagatatagatatagatagagatgtacaattttaagaccataatttctgatctatgtatgcgaatccctgagagatagcatgcacacatgcacgcacacacgcacgcagacacacacacacacacacacacacacacacacacacacacctgccttatcacgtgtcctgaggtcatgaaattaagatcttaacattgcagaatatgtgaaattaaaacaacatgccaagactttctggaactctctaattttctttgctttattgttttcttagcttctgccatatgaatagcccaactcaccaaccaaaacaaagaaatttaaagtctgaataaaagtcagtataatattatatggctctaagaaaaactatcaagcaagagtatgtctagctgactatatttgcaagaggacatggagtataagcaactatatttttagcaagctgtaaagctctagccagggcagcaggaagtcaggtatgtttagtgtactcataaagcttaactaaggaattcagcaataatgcaagtcaatgaacaggtacttaaaccaccaaagcattagagacatctctaataaataacctgagaccttcatcatgctgtctaaagattaagcatatgagtgtaatttaaagtacttttaaaaaaaatgtcacacactacagtttaattctcttaccatcgatagtattcacacaaagccatgctgccaaaaaagttcacagaacaagtataagactatcctgtatgtaaggcttgcttataatgttggctattggtaatagtgtgggaaccaggatgtagaatatatcccaggtttcctaaatattaaagtgagggtcactatgtctattgatatgaaataaaatgcttaatgatgaagatctgctttgtattggggaatctgtatttttcctaaaagttcaactgagcacctatataaatagccaaaaacgaaaacaaagtaaaacagcaacaactaaaagaacttggggaactaactttctactggccttccatggacaagacggtcacacaggtcactcacatattgctatattttcactactggggaagagagctttctgtgtaacctctctcaggagtcagacagcaagccaacctacccatggattcctctaggacctgcctagagctcgtcccccttggaatcaagcagtgtctactagactacactaagaatttgtaactgttaataaaactaatccctcactctggtgagtccttttaacacaccttccaatgaggagactgccatggtaacacttatgcctatcatacatgtgattgtgttgaatacatataaaaataaataatgaaaaatgattcacactttgatctggccctgagaatcctttgggaaagcattccaacaagaaatatatgatgactgtagattcaaaattttaattatcatcaactattttccttataaagtcaacaattggttgctggtgatatagaaataaatatatggcccttttatggaagggtttacagtattaaaagaaccctgtgcacactgacaaactatgttcttggaattatcagttcctgaaagttaaaaaaaggaacagacatcaccacattctctgacatgtaatttgacttgcacaatttacatgattctctttggataataacaatgatattatcatctttcaaaccctaagtcatagcagaatcattcactgcatgtggtgggggccttactagaatttatcagctatcaatgaaggtatcgaacccagggcagaatttatttagaatacaaacacaatcctaaccctcaatgatcacacagtctcctaaaagagatagggtagtaaatcaatcattataattccatattagaagtgtgataagcttaaagtaagtgaactgacaacacagatggggagcatgcgacttatcatcttgacaatagataccataaatgttagaaaacaaatgtgtgacaaagtgccaaagatgccaacacccaaaagacagtctgaaaattacatataaggttagtgttcctacctgttatttaaagcagttgtgcattttcctttgagttataaaattagagaggacattttagaaacatgtaagtttacctgatacaaaagctagtattaaataccctttgaaagaagacactatcgttgtaatcaagaacaggattgctgaataaattatattaggatgggtatatagtctcaaaaacatgtcattttgcatttcccctattgaaaaaaacatctaccttgaaagatatgcttcatttttacttggcattatgctgaaaacggggctaatttttcaaacaatttccattaaaatcaacaaaaaaacaatatttatcgaggggaaataaatcttgaaattacttttaatcacttcattaaatttaaacctctttactttaaagaatgacagatgttttcttctttacacagaaatattacactctcctatctttgagggcttcaaaatatatattagttcaaaatccatttcttggttcccactgagatttaaattacctgaaactaatagcctcactgcaagatttctattgcatggcttgtaagttgaattcaccagcatgacatctatgttttatatatgtaaattccacaggtttactgtaaattcatgacattgactacagtggtttcctaaaagcttggtactgccactgaaacaaatacacaaaatgagacaggaagcatccataatttttcttcttgcctattttattgtggcaatcatggaaagaatagagacagtctaaagcacaaaaaccaaaatagcagctgaaagcactataaactatatgaaaaagaaatatttgcatataaatcaaaggaagcaataaggcttacctcatggtacataataaaaaattattttattacagaagctactgcctgcattctagcctcgattattacattttccaaaatttggcatggacaatatgaaaagaaaatttactaacaataatatatacagaattcaccaggtttttcctttacctttttaattcttcctaatgctataagaatcctagtatgcagaacaaaacataactgtgagtgaagtaacaggattggtgtcatcaggcaaaaagcacagcccagggagatatgtttcagctctgggccctctcagatgtaatttctgcaagtatttatttcttatgttaactaactatgcaaataacaatgtcattgttcatcagtcctatctgccaccagttactctcagaaaatctgcttacaatcatagttatttgtatagatataagtaattcccggtgggaattacctgaggcccctgtctgcacagcactttgattactcccaggtaatcaggtaagcacttaaaggcagacagcaacttcttcagaagttgtcaaggggctatttaattcattgcaactgccaaattcttgatcactaccacaataaataacttcttttatactactgaaggctgtgaagtttcactgatggcaacagaatttagtacctttctataaaaagagccctgtgggtacaatggtatcttggatcaattggtttcttcaactgtctttaaagacagagattacttcaaacttgtgaaaagtcatcacttgactcttcctctccttgttttcttgtagcattcacggattttctcttcagctcctctacttgcttcagcaattctagtccatccttgtgctctctgatatattcttctatttttaattctctcctttctgctttcctgaccaagagaacctgaaactctagggtttggcttgtgcctcccatgtgaagactgctatgtttgaatatctgccactctagaacctatgttcaattttaggtgttcctctgaccatgattgacagtgtaacctatggaaggtgataggtccatgagggttctgccctccttggtgggatgatactatgataaatcagcaaattcatcctcctttcacctctctgccctttttctttcaggtttatgagaacaattcattctgcctctccagaagatgcagttagacggtcacataggatgctagcattttaatcttggacttcctatcctccagaacaataaaataactaagtttttgctctttatgaattactcatccttcactattctgttattgctgcaccaaacagaagatgtcaaaaacatgtgtgttgatgtcccagtgtttcagtctattttctcgttgctttgacaaaacacataacataggcaacttaagggggaaagatctattttggctcatggattgagaaggcacatacagaaaagataggtgactgtagtgatgggtctatggtaatgaaagcatgaagcttcttgctcacatctccatgatcagaagacagaggccgcaggctagatggtgacccaagctacagcccagaagttctagttcactcttctcagcagctcattttctctagaaagactccacatcccaaatgttgcataacattctaaagcaaagcctcgaggcggggaccaagtataccaacacatgagcatgtgatggacaccttacatgcaaaccataaaagatctccattcaattatcaagctcatagtcactacctctacagataattagaaaactcctgagctaattgggagcatgagggtagaggagagggagctgccacaataacagcaggagaagagtagtagaggaaaggaaatggacgagcagaaatatgagttgggggaagaatagaggagagagagcaggatgagagataccatattagagggagccactataggttcaagaaaagatctggaactagggagatgatctgcagagacctacaaggatgacatgatctgacaatccaggcaatggtggagaggataacctaaaagcccttcccctaaaatgagattgatgacttctctttatgccatcctagagacctcatccagtggctgatggaagcagagacagacatccacagatacacactgagctgaaatctggaatttaattaaagagagggaggaatgaagatcgaagaggtctgtaccaggttggagaaacccacagaaaaacttggcctgaacaagggagagcacatcgacaccagatgctgtcggggaggccagtacaagactaatccagacccctgaacatggatgtcaataaggaggcgtctgcactccagggagtctatggtagtagattagtatttttcagtggtgtaagaagggactttgagagcccatcccacttgaagggatacattcttgccctggacacatgggaatgggcccaggcccagcccaggaagatttggtggactttgcagagcccctgttgagggccctaccctgcctgaggagtggtgggtggatggggtaagtggtaggttgggggtgggggaggaaggatgggggtgaggggagggagacggagaagggacttacatgtgaaacaagcttgttccctaacttgaactaataaaaaaattaaaaaaaagaaaactgataacagtttctccaatttgcatctgctactaatggctttgatacatctacatgctattgatgccaatgctaccactgaaaacctctactcttaatacttcttagttacttgttttgttttgttttgtttctatccaaaaaggaaagagttctggcatcagttaccagcctgctcatgcctaagctttatcaccaaaccagtaacatataaatacgtaattcctaattcttactagactgtgactgagcttcacctcattcttctcccatcttgtcctattttagtcacaactcacacatgcaaggctttttcctctacaatgtcacatcctcacacacatacgttcacacacccttcactgtatagtggtatctgttctgaatgttttaccaatatcaccgaatttacccttggtttgctaagatttcactgtggtctgattttgtgcatttgtcatgtaattctgtatcctttgcaggaaagaaaatactttaggagaatttaatctaactgtatttttcaaataaaatgttacatttataaagatatattgaaacctagagaatcatacctatccatcactagcatctacctgagaggacaggaactgatacctacctagcaaatatacacatgaacattctagtctatcacaagtccaagtaaactttcaacttgaggaaccatttaacctttttggttcctactatgctcccaatatctataaaagtacctggcacattcagaaagtactaaataaatatttttaaataaatgactaacaaaaaataccgaagtcatatggcttatagatcattggataactacagacaagtcatagaagagtcacacaattgaaattgggaatatgtatgagcatttatatcactgatgaattgaatacatttcaataacattaattttgtttcttagactataagtctatgggctgggaagatggctcagcaggtaagagcactttctgtgcaagcatcaagacctgagttcaaatctcaactattcatgtaaaaagttaagtgtattgatatgtatgcttgtaatctcagggctgggagtgttggggcggggagacagatccggttgaaactactgggagccctaggttcaattaataaagcagagaatgacagaacaggatacatagtatcctcatctggcctccatgtgcacaaacacacatgcacatcaacgtgtgttcatataccacactcacacatacacaccactgaaaaaactatttcaataaatacagtatattacatcttaattttaatttcatctctttccacttgactgttgctcaataaaatatttatacttgagctattctgcatacacacaggacactaaagaactaataacttacattaggaaagtagctcagtggttgagtacttctactgaatggacaaagccatggattcaattcctagtactgcataaaaaataacttactgatgattgttcattatataagggaattatctcgtgtttaccttacccataaaaatgcttatctatgcttctgtaatttattttcttaatactttttttaggaaaatagtttgaacataaatctgaaggaaaagagaaaatgtgaatgaaaactaatttaccttaagagagagcaagtaactcttacataatgaaacttcaggtatattttatcctaattactcagattagcataatctaaaggacagaacccaagacagacaccctaaaaagaaaagtgaaagggtttaaaatgaaccagtcgaatgggtcaggtaatgatgacactctctattagaaggaaagaaatggcagtgctggggaggtaattttccatcagtttggagtaaacagaataagggctctgaactttgggctaaactttaagtagagctctcttttgtaaacataatttactgagcatggctgcaaatgtctagaatgaagaaactgcaaagttctgaataacagaatgtagtgtttacccacattccagaaaacagcactgcagattacatttcaaaaataaatttgggcatatttgtaaattcatgcttgataatcagaatgacaaactcttcttaatgtctagacagtagtgaaccttgaacaggaagatgactgaaaactttactcattcagtagtgagaattctcatgtccaaagaagatttttctaagtaaattttaactggagatcgtcactgtaagcaaaataacccagaatcacaatcacaaacattgactgctttgtctcatatatggaaaggatgtataaatataaaatacatatgaataagatacaaaagtaaaaggcctaaagggaagaaaaacaagagagtaatggtggcaagaagcaaaatattacatattttcgctcatgcagaatctatattgacaaaaagttaatacacacacacacacacacacacacacacacacacacacacacacacacacacacacatgccatgcttattttcctctctgttgtnnnnnnnnnncacacacacacacacacacacacacacacacacacacacacacaccatgaaaacataaggtaaactatttggaggaaacaagagaccagcaagagagtgatgaatggatggggaaggacagtattaggtgacaaagatgagcaaggggtgtatgtatgtgtgtatgaaatgtcataatgagacccattgttttgcaaaccaactacaaatcttaatatagtcccagttttaaaaggagaattttgccaggcatgaagacacactcctttaatcccagcacctagaaggcaaaggcaagaggatctttgtgatttttgaagccattctggtcaccataatgaattcaaggacagctaggactccatagagagaccctgtctcaaagggaaaaaaagtagaatttaatacttaaaatattcaaaaggattttgcagtaacccatgtaagttccatttataactacaatgaattaatgtttcaagttgggtcttttgctacctcaagttgtgctgtgtacttgtcgaatgtttcatgtgggtgactatcagaatggccgctggattaaagataatatacactacaaatgaagcatacattacttatttaatttatttatatgttatttttagtaaaaacatgaaaggcattcacagactagcaataagttgtggcagtgaatttaaataagcaatgtatgagagcataatgattatttttttaattcaaacaggaaggggaggttaataaaatcctattttacagaagaatgccatataacaaatgcaaaaataaagacaatatcagaaaatcattttgtagcaaagcaagtaataaatgacttggagcaagaattccatccacaggtgtgaaaaatatacaaaatgttgctaagtaatagtttacttacatgatctcaaaacatcctatttatcacttattaaattcaaatataaaggacacttactcagcacttatgatggggcagcaaatacccatatccctcatgataagatgctctaaggccaagaagcacctatgtaaaatccttactaaaaatatttgccctaaatttaatcatgaagatacagataaatcaaggctgggaaacatttttcaaagtaactgacttggtttcttcaaagtcttaacaaaaacatatcgaatgcatccaaactgttctagattgaaggagatgaggaagatacagacaataaagtttaatctttaactgtactgtaagaatataattataatgactactaagaccgttggggaaatttgaaaaatgggcatagttgaataacagtatcatgtcagtgggggaaaataccttaaatttgattatatgcactgctgatgttggagaagttccttgctctttggtgatacatgtttaagcatgaaaggttgaagtataacaaatcagcaacaaagactccaaaaaatggaaaaagaaggaggaggaaaagactgaaaaagcaaatgtagtataatataatgctttaacaagagactgagtgggagctatattcattgtagcattgcagtgatctggaagccctgaagtaagtaagaaaagttggcagggagttccttacatattcataaaacagaccaaacaagtaactatagaattatcaatcaattcatttaatcaaaacattatctgccaaaattccaatctcattttaactcatttcaaaagtgattaatttgttatacacaaaaagcttagaaaatattttgggtgattttaatcaacttcctgaaatgtgataactcaaaaataaaattagaattatgcatttgtgtattcacatacaatttgatgtgacattttataattggactacattaaaaacaaaagcatgaaattgttttagcagctatttcagcctagtcatctgtttaatacaagtaatttttccaaatgaaaaccttgcttcatttggaatagtaattcagcagtaccttccccacaaacaaggaaaagcagggcttgccaaattttgtcaaactctttgatgcatttctgctattacttactgaccccatacctctagatttgtcttcaaattacttgtgccttgtaaatatgaaaatttacatcttgatggcaatgtgtttcattttaattcaacaatagactaggaagcatggcaatttttcatcaggtttctcaaactatacagaaaaatacacttaaaaacaaagatggaccatagctattcaaatactcaacttttccaaagataaaatcacgccatcaccaaacaaggagaaaattggttctggatattgagttttcagtaactgtaattaagggattcaagggtgcctgggtttattacaatactactttattatcaaatatttaatctaccaaaagtattttatcagtttatatcattataaagtaaatatgcatttctgaaagaaaactgtattgactaaaaattagtatcaattttaataacataataatgcagcaaagaaatgactgtgtataaataaatttaccaaaatataataacacttcatataaggggtataggattgtgggtcatttttaattcctattccagtttgctaaatgttgttatgataaacaccagaaccaaaagtaatttcaggaagaaagggatcatctcctcttacaggttatagtttatcatcaaggcaggaaggaacctggagacaggagcccatacagaggccatggaggaatgtggcttactggcttgctccttgtggcttgatcagcctgcattcttaaagaacccaggactaccagtccagggatggcactacccacagtgcatagagcccttggacatcaattaggaatcaagaaaatgtcctacaggcttgtccgtaaggggaattttctcaattaccattccttcttcccagatatgactaggttgacaaaaaagctaacaagcacatttccctttttcaactccactagctttcagataatgcactgtttttttaaggcagtcttttaaattaatacacaaagtagcatgtttcattttcacacttttgtgaatatatgccagtatgtattttttcattccctaggctcattttccctctcttcctcgtccccatcttctcatcgcaattacattgcccttacaaagaagaaaggtaaaattttgaaggcttcttttaaatcatgtatttaaaagaatttggggcttttatacttatgttcctttttaaaagagggaaaattcttaactactaccagaaatctgaaattactctgtcagaaactttgtcatttctcattttctatgacatcagttttagaaagttattaaacccctaatttatggagtattataagcaaggagttcagactaaataacgatgccatggctgcacagtttaaagatgggtatttttcatatttagatgccagattaggggatgacatccatagttgcttatgccttttcataaagaagcgacagtaaacataatctttagccaaagagcaatgtcaaaaatgtgagattttacaaaggataaaagcataattggcttctaaagaagacactaagtaatgaaatgaatacataaatgcattatcagccagcacttgtagttcaacacatttcttttgaaatgtgtattaggaactaccatcagaattatctctttaactggttattactgtaatggcttaatatgtagcatatttgacagtttacaagtgtttcataactccatcagtatagcaaaatacacatggagatgtggactaaagaaaaattagtcttttagcccaagtcactgtggcatagaaaaagtaaatccctgacaacaacaggtcttcaaagtccaagagctataatttttccagttaaacatcaactttgtttaattagcaatatttaaataaaatgctaatgaactctcaaaagacaaggaccatgtattagcatgcattagacataatttaaatactgttggctgtaacagaaataaaataatgaagcatccctttgttcaactgttataatttctgcattaagcattcattttgtatggaaggtttcctgtaagtatgattcactgtgtacaacatgctgtgagcaaacacaatcggagaaagattctaaaggaacaatcaggacgcttctcgctggtgtgatgaagagctagtttgagagaatgttggataatgggacaagaatgacgtggaaggtggacccttcccaatattcttcacccacatctaaactgaagaaggagaacacttacatagacacatctacactctgagcgaaagaagaaaaagaacatcgagacagggtgggttacaaagaaatacttaacagttctgaagccccaatctatagactgtactcccaccaaaaaaaaagaaagaaaaagaaacaacagtaaaaaaaaaatgacagctctaacaggataacttgaattagaagaagctgaaaggccccttaagcctacaagtgccctaggagagttcatgtgtaataatgaacaactttcttcagtgtagcagaaaaggttatcaagaagaaagatatttcattttttctttttattctaaggggggaaagagatttttatgatgctgaacttcatctgcaaagcatgagcactgtttttgagaagcattataaaataactagaagtcttctgatttcagttcatatgcagtcaacttcacttgagttataagaatgcagtgaatgaacagaagttactaattattttattgctgttacaggctagggtatttgaaaatgtctaaggtatactaagacatggtccttgacctctgagagtttataagcattttaattaaatgttaattaaacaaagctagtatttaattgaaattaattataaaaggcaggagtacataagataggtgaacatttattatataaaacgcaaaaggacaatgttttatttctttcagcatagaaaaaatggcttcaaaaacttattgaccaatgatagaaatggaattgcttccagcgtgtatttttggtccctaatgcaacagtaattttgcactttttcctcccactgaagttgcataacatcatctgtttacatgaatcaatgttgccaatttgcaaatgactactccaaagcacaaagatcattcttgctcaatcattggggcccacaaaacaacaggtgcaaagaggtatttcattccataagatgcagcatctcctgcacagtatgaacagactagaaatggttccaacagatttaagcaatgaataatctttaaaaatacatgagatatccttgtcttgatgtattttgggtcttgttgttttgttgcataaatcagctgggcaaatgctttaccactgagccaggttcccagatcctctgcatcctacccaaaacaagtctaatacacaagcttgcacactgttaaagcattagaaactgagcaagtagctagtcattgcagtaatgaatgtgaaattagtgaagactaaaatgagtgctttaatagtgtttgtgcagttctttaaaagatcacttattatatgccaccactcaatagtctcgggtcttcttttcatcttactaacaaatgagtttttctactttatagttaaaaataatgacattgattatttttattctgatcgaatgcagatttttaataagattgttaccaccatcaaaactaaatcttttacagtagcaactattctacaatgtctaaatccgttagaaaaacacaatcaacttggaatatgagaaagcaatgttttatcatcatgaagtaactacttcaaactccaataatcaatgttttgtctcccccttctggactacctaattatagaaaggaaaaaataggaaaataagatttaatctttcctcaaaggatatgttcagaaaattggcgtgactcgggtatattgtcaacatgaagaaatcattgaggtactatactgttaataaactaaataaataaatattaaatgtaaaaatagactaacagcttgacagctcacaaaagcatgctgccatgcttagcaatactttatgaatgctactaataatagagggtttattgccagatgcatagaaagaacattgtaaacttacttagaaactggccataaatcaatcactcagtctccatctcaatgtctctctcttgctgtcttcacagtgtctcaaactgtggtgcaggcttagccttgagttcttatggctacttctgcattactttctttaccatcctgaatcctagagacctaccaggctctcttttggaacaaaaccctgtaaatcactcaattaatggagacaattctcataacctgattaggggcaaaagtaacacactgagccttcactacgatgagcttgtcctttggactgagattacttagaaagattacaaaaggaaaaaaaaaagtcaggttttaaccatttgagatcgcctatttgaaagacaacacaccagactaggaaatacgtgttgccttctctatgctaacccaccgagtcactgaaatgcactcatgtcactcctgacttagtaaagacaatagagcttcagtttatgagctagtgaaatatattcaaatgataactgatctcttctcatcagcaaggtacagaaagtatattttaaatagcaaaagcagcaatctgcaacagtgagccccattataaaaatcactctgttaatgctgtaaaactaaagagaagtccttgcatggccagattttacttctgcttttgtggtctgagccatttctccttgatttacgtgtctaactgaactcatcatcttggactccaaacttggtcttgctcttgacttctgtatgaatgctcaagtcattttaatcagccacgcttgaaatttcagtcattattaaggcacacatctcctgtgccctttatattcatttgctgagactgatatagttcacatccagtcttccttacactctcgtctataccctccatttagttcctactaactacattgcagttcagagtcatgacaaccctgcagaaaccacttgcttgagctctcagtcctcagtctctaacctctccaaatctactactgtgagtcctccacagcagaaacctctgattctgtcattccaagtctcacaaactcgcagggatgcccaatgactactcaactggcaagtctttcatacagttctcctaaaatgacctcagcatacctttccaagtttagggacctctagctatacttaagtgtatgtgcagccattgtaactagctcttagcattggttattaaaaaccccttcctgtcctttgcccatcccatgctacctacccactgtgtcctcatttctatccctcaaacattccatgccccatcttgcctcaaggctttgcacttgacattgtctctggcttcaaagctcttccctagatatcggcatagctgtctccattttcactgagttctcacttgctcacatagctcgcctgtttaaaacagtatatccctgatcactgtgcttcctcctcttgctctctttttacatttttcctcccatagcacttgccaaaacctgtcataatatttgatatgtgtcttactgtctgttttcccaactaaaatgttactgctgtgaggacaacctgtatagtttatcatgctaacactacaaggaggcctagaaattacgacctgtgtatgtaaattgtggtcctcagctccagctttctacaggtcctgtcaaggtagagtggaaaaggtccattcaccagaaagactgacctgccagttccctaaatgggagctgaaggcctaggtctatatgggcatttccaggcttttgtttcatctttccctctaaggcataacactgctaaggaaagggtggagacagaatgaaactggctctctctcaccaatattggtataaaaggggaaacaaaattatttttccactttcatgtattttgtggccttttgtctgaatacatacatgtattagaatgcaaagtcaggcattatggtcaggagctctggcaatattaccaagaacgttgcctgatatatgacaggtacctaataactctgggttctaaaaagaagtcattgggtgtggcagggtatgcttgtaatggcagtgtgtgagagatcaccacaggaagaggagaagtaaaaggccagccttgggtacatgaaaccctgtatctaactgtcagagaaaatgaatgcatgctaaattaggcattttttcttctgatagaggatcttactgtgtagctctggctggcctggagctagatatgtagaccaggatggccctgaactcaagacactcacctgcctctgccttatatgttgtgaaattgagcgccttcaccaccatgtctggccataagtcagctatttaaattctgctgtttccataggtaaaacaaacactactaaagtccctgttgctgccctagtcattgatctatttattatactaaagttatctatgtttaaccctataaggtctaatcattatagttataattttatgtgtttttttattatttgacttttattttaattagaaagattattttacatgttaattccatgtccctctccctcccctactcccctgccacccccaaacttataccctacctatcccatacctttctgctccccagggagggtgaggccttccgtagggggtcttcaaaatctgtcatatcctttggaatagggcctagacccacccacttgtgtctaggctcagggagtataactccatgtgggatgggctcccagccctgtgtcctgtgtcagatgtggggatgctgaacatcttttcccaatctgtgggctgtcattttgtcttgttgactgtgtcctttgccttgcagaagcttctcagtttcaggaggttccatttattaattgttgatctcagtgtctgtgctactggtgttatattcaggaagcagtctcctgcaccaattcgttcaatggtgtttcctactttctgttctaataagttcagtgtggctggatttatgttgaggtccttgatccaattggacttaagttttgtgcatggggacagacatggatctatctgtagtcttctacatgccagcatccagttatgcaaaagtatcgtgtataatcaggtcaattgttcctttttccttatagaagaatgcttactttttttattagttcaaattaggaacaagcttgtttcacatgtcaatcccttctccctctccttctcctcatccacacccctcctaacccaccccgacctaccccccacccaatccaacctccactccccaggcagggtagggccctccacaggggctccgcaaagtccaccacatcatcctgggctggggctggacctttcaccatgtgtccagggcaagagtgcatcccttcacgtgggatgggctctcaaagtcccttcttacatcagggaaaaatactaatccaccaccaggggcctcctagaatgcaaaggcctcctcattgacatccatgttcagggatctggatcagtcctgtactggcctccnnnnnnnnnnnnnnnnnnnnnnnnnnnnnnnnnnnnnnnnnnnnnnnnnnnnnnnnnnnnnnnnnnnnnnnnnnnnnnnnnnnnnnnnnnnnnnnnnnnnnnnnnnnnnnnnnnnnnnnnnnnnnnnnnnnnnnnnnnnnnnnnnnnnnnnnnnnnnnnnnnnnnnnnnnttccatcagccactggatgaggtctctaggatggcatgaaaaagtagtcatcaatctcattttaggggaaaggcgtttaggttatcctctctaccattgcctggattgtccattcatgtcatccttataggtctctggaaatctccctagtgccagatctctccttggacctaaaatggctccctctaatgtggtatccctcatcctgctctcctctattcttcccccaactcagtatttctgctcctccatttcttgctctcctctccccttctcctgctctcattctggcagctccctctcccctagcctcatgctcctaattatctcaggagttcctgccccttcccattcctggggtccatgcatttatcctctagagtccttcatgtttcctaatttctttggtgaagaggatcgtaggctggtaatcctttgctctatgtctaaaattcatatatgagtaagtacataccatgtttgtctttgtctttttgtgactaggttacttcagtcaggatgatttcttctagttccatccatttgcctgtgaatttcaagattccattgctttttttctgctgagtagtactccattgtataaatgtaccacattttctctatccagtcttcagttgaggggcatctaggtggcttccaggttctggctattacaaacaatgctgctatgaacatggttgaacatatgtccttgttgtatgaacatnnnnnnnnnnnnnnnnnnncacccaagagaggaattgctggatcttgaccagtaggagttgctttgccctcatagctgtctgttttgtgtcgattatttcctgtccttgtcccctcttcctcttctgactgaatttcttatcaggcttcctgttctgcgactaggataaatacagttgcaacagttggtgaaatctcaaagttttgagagccttaaaaacatagcccatctttccttcagtcatgtctcaggtggctgaggatccttgggacagttgaaacccggggaacttctgaagttaccgggtgctataggtctgtatatatttttcttgtttgtgtgctgttcagtgtcatttcttcttctagcatgggggggggggaggagtcctctgtcgtgaattgggtgttttgtagatgaatcctgtcagttggcgaagatcttttcccattctctggactgttgttttgtcttactgaccatgtcctttgccttacagaagcttctcagtttcaggaggttccatttattaattgcagatttcaatgtctgctactggtgtaatgttcagaaagcagtctcctgtgccaattcgatcaagggtatctcccactttctcttctagaagattcagtgtggccggatttatgttgagatctttgatccatttgcacttcagttttgtgtttggtgacaggtatggatctatctgcaatcttctccatgtctgaatcaagttgtgccagcaccatttgttgaagatgctatctttcttccattgtatagatttagcatctttgtcaaaaataaggtgttcataggtatttgacttttattttaattagaaagattattttacatgttaattccatgtccctctccctcccctactcccctgccacccccaaacttataccctacctatcccatacctttctgctccccagggagggtgaggccttccgtagggggtcttcaaaatctgtcatatcctttggaatagggcctagacccacccacttgtgtctaggctcagggagtataactccatgtgggatgggctcccagccctgtgtcgttgggattttgatggggattgcattcactctgtacattacttttggcaagattgccatttttactatgttgattctacctatccaagagcatgggagatctttccattttctggtatcttctttaatttctttctttaaagactcaaagttcttactgcacaggtcttttacttttttggttagcattaccccaagatattttatattgtttgtggatattgtgaagggtgatgtttctctgatttctttctcattgcatttatcatctgtataaagtatgtctactgatttttttgaggtaattttgtatccagctactttgctgaaggtgtttatcagctgtaggagttccctggcagagttttttgggtcacatatgtagactagcatatcatctgcaaatactgaaagtttgacttcttcctttccaatttgtatacctttgatctccttttgttgtctgattgctcaaactagaacttcaagtacaatattgaagagatatggagagagtggacagccttgtcttgttcctgattctagaggaatcactttgagtttctctccattcagttgatgttggcttctggtttggtgtatattgcttttatcatgtttagatatgttcctgttattcctgttctctccaagatctttatcatgaaggggtgttggattttgttataggatttttcagcatctagtgagaagatcatgtggtttttagaagaatgcttacttttatgtgtgtggataaaggattcctggcttgcaggaaatcaagtcaattatctaaatctgttttatttgaggtgtgattaaacaataaaacatattctaccaaaacacaaagttctaccacatttattagaactagaatcccccaaattcatcattcagttctacccagttctacctctatttgaccccaaattctctgcaacttttagagaggtaatggaagacattttatcattttcccatcatagacagaatctatagaaaatcttcaactattttagtgactttaaaattaatgtgtcagtattaacttgagaccacataggagggtttctattgtttttgttgttgctgctggtgttgttttgcatttttctcaaagcctagcaataatacacaccaaataacatacagcttccaataaagagataaagcctttttttgaattttcagaaaaatccttcccaccatttttttccgagacagggtctcactatgttgtgaatacctggctgtcctcaaactagcactgtagaccagggcagcctcaaactgtcagagatccacctgcttctgtcttctgagtgctgggataaaaggtgtgtgtcaccactgcctagccttcccatcattcttgaccaagaaataattgcacccatacctttaaacctacaaacagcatatatcttgtatgcttagaaaaaaatacttcatgatcttaattttagtttaaaaagttattgctatgttttatactttcaaaacatgtttacataacaatcataattaatgaaaggataaactggacatatgactgaagtattatagtttgagtatattaaatacaaatagtccactgaaacctatcctgaacttagtattttcatttcaaaatgggaagtctgaagttcatatatgatctgtaaattactcaagatcatacaggccttatgcaccaacagagtctgaaactggacccattttcttataaatgtatgacttctataaaacatagaatctgtcctgtggacgcagaaagacaaacccaaacaatgaaagcacctactgttcaaatatgtaaattgctataaagtaaaataggaatgtcatttttaaaaagcccttggggaatatgtaaagtcatataaatcaacaaatagaaaggaacaacatgtgtaaaagaaagagctacaggaattccagtaaggcatccagtggaaatgggaggtggtctggggagtcagaattaagtcaggctttatgcaaaagatgtggagtgaatatgggcaagatattcatacagccagaatcagtatgacctgaggatgaggttgtagttatatcccaataataggcagcttcaggtttgttttttaagtaaactttataaatataaaaaatgaaaagcaacagcaatggtaaaaaaaaacagcagcggggcctcaaatgctattatttcagctcgcaatcagtgttaaagaaacaaaagagaaaaggccatgcagacctacttcattgtatattccatttttccaatttcattccagcttttccaacactcatttttaaactaatgttaaaatctctaagtaatcacaatacttaaataggttatatgagaattctactgtctatagcacctctatgaaatttctacctgcctattttaccagcaaatatactcctcccaccttttggagattaatgagcctatgacacataagccctttgaagctgtcttttaactcgggtgattttatatattgttggttcatctctctctttagttgcaaaatattaaataaagtaaaataggacaaaacaaatctccataatgcatacctcctgtttcaactttaaattaaaccttcctcatttcctgtagaagggattactatagtttacttcttggcaacagaagttgacagttcaaatgggcaaaaaatggccatgaaagaagacatactctagatctatccatagaacttaatctcaaagcatcacctttgaacaccctctgggatccatgcacagctgctagtctctccatctgctataacaatacagcctcttggggacctctatctgttaaatatacttgtctgttgtcatctatctttttcccctttagactcagtttcttgaaagaaaaagctgtgttgatttgcaaaaggagacaaggaagagctttattctaaaatgttaaaaatatggtagtagggcaacagggaatggaaagactgacatgggagagcttctttctgcaacatgaaagttaatcaagatggatacttagaagtacttgctgggccaccaaagaagaaaagagtattctcttttcttgcttgatttagaaggattcaagaaaaaaaaatatccttaggaagcgtcaagggtacctgtcaggataaacacagggacacagctaaagatgacatttttaaaaggaagcctaagatcagagagatagctcagtggcctggcaacctgagcaaaatccccatggcagaatgagaaaagtgacttgagggagttgtcctctgacgtccatacatatgccatgaaatatatacatgtacacacacaagtaaatacaatattttaatgaatcagagatgagattataaagggaaacagagtcttttttggttttttaagacagggtttctctgtggctttggagccgatcctggcactcgctctggaggccaggctggcctcgaactcacagagatccgcctgcctttgcctcccgagtgctgggattaaaggcgtgtgccaccaacgcccggaaactgagagccatttgaagattttaaagaggatagtaacatgttcctggtaaccacatataacatctcccatggaggaagaggaaaggagggaataagtaaggaacttttacaggtacagtaaacacattgactatactaaattcatcatttctctgtgatttttaaagatgcttcatatgctatattctccaaataaatgacatatactcaaggagacaaagtaattataaacatctctgaaatacaatgcagggaatgtccagcttgttatattacaactacaataccataaatatacaatctttaaattgtagcaccaacaagaaccttaaaacataagctgaaatttcaacttatctacttaatatctgaagttcagggaaaaaaattactcaccaaatggcagagtcaatatatatcatcctacaaagccagatcttcaggactcctaactgaatagcatcagttgatatgaacacacgtgcacagacacacagacacacagacatacaaacacacacacacacacacacacacacacacacacacacacacacacacacacacacacacacacacacacacacacacacacacacacacacacacacacacacacacacacacacacacacacacacacacacacacacacacacacacacacacacacacacacacacacacacacacacacacacacacacacacacatcaatgatgcccaaaccaaagacagacatcaaaataagaatttgtgtaaacagaagaccaatattttaggaatgccagcacacatacacaaacactctgatcccgaaaaactgacatacaccacacaatttcacccatgttgtctaaaatgacagacatgattctccaagggggaaaaaactccaagaaaaccaaggcatattctagttctaaaatatattacaaaactgtaagaaagtacataaccaacctaaattgtaatcactagatgtcaatatttgccttaacactttggaaaaatatacatcaaacaaaaactaaacattaattactgcatgcaaaaaatcacaaatttctgaaacacaaatttagtactaaaggtaaaacatatcttttgtacttaccgtaactttacttccaactatctgtatgcagtggtcaacggagaatggttacagtgtgaaaaaaaacaaacagcaataatattagtaatcagaagctttgaaagaaggtgtttagtaaattagtcactagtctactctagtaacaaacttaaaacaagatagcaatattaatgtgtgccatttctaatatagagtttacacatacagaaaaatgatcatgatgttgtagaattgtttaaagtctgcactctaataggttttccatgcattacaatctaaatataaaataaaactccaatatacactcagataatttccctactcacagccactaaaagaaattaccagtaggaactttttccaaattttgctctcgttttctttcctagctatggtaaaaatagtgttaaggtcagggtaagttattttaaatgacaaatgtttcatttaaagtcatgcatcaagttctgaaatgaacttgacttgaaaactgaatgttttatattgttacaaatttaaaatgtacaatatcattttgacttatacttttaaatgataagacacatttgttattatttttttctgggtcatcatactgttccaagtatgaagtcagggttctctatatgatgtgaaaacaatgtattttatccataaaaatgcacatattaatatggaggaaacagatcagaaatttcaagagacgaagcaatttctgagaggcaggactgtgcttaagaaaacaagagggaactctcaacataaacatattcttatgccaatatcaaaatataagtccaatcactgttatcagattctcacacttgaatattaagcattgtatcaaagagagctaattcatgattcatgtgataacagttattatcaatacctattgtatttttcagctagtgctttaaaacaaacatcaaatttaattgaaagccaagtaagtatcctcagctgactaaaatactacaagatacaaaaagataatggtggctgtaaacgatttcagaggaatccccgagcctccaaatgaagaagcaagttccttaaaaattcatataacacgctatttacaagcagtgataatttagatgaatagaagcttctttggtgtgactaacagtcctctgaaatgaaagatatgctattgacctaaattatttcctcccaccaaagaagacagagtttatatttgtcccttgtttccttagcacagacgtgagaccaaaaggaaagaatgagagcctgtgttaacaattaatgcaggttcgtagtcagtgaaacaactaaaatgttgcccattcaaggtctgttttaatgatttgatcagattgcaaaatgatttcatttagctaaagcacacagagaaatatattagattgattagttaagagaaccaaggagaaaaatgtttggtcctatctgggctcaactgtttctccttatccatcccatgtatgaaaaggacctgaggaaaaagtatctgaaaatggcaacaacacagccacaataagtgcatacatattgtcatgtgcaccgtagctttcatctacttgttttattggttaaatctacaaatttgagacacaactgatctaatgatgttggattatgtactattgagggtttggggggaataattacacctctgaatgtctcacacattgtcaaaagtgtaatctgacatgtcctaaaatctaaatttcagaaggtataattaaaattagaaataaactgcttttttcatattgtcgtaaggataatggtgtgtgatgcactaacattaggtctctggtggataacatttcctaatgaatgtctacatactctgttaggagtatgcaagatcttctctaaatcagcagcataatgtgcctcattctgggttatgaatcagtagggcagctttaacaataccagcagctttttttccagttctgcaatggcactttgaaactatacaatctactttgttatttgtaacaaaataattcatatcggctaattctcttaggtcaagcctagaacggtacctcctacaatacaagcatttggctcccagagcaataaaagcacactatgttcttcacatacctatttaaagttcactcatcactgggatattcaatctaccattactttagcatacacaagtgtctattatagaactttacaataagtgtgaagggatgaccaaacaatagttttacaacattaacttgtagtttccttaatatcctcttatccaatactaattttagcaaaaattaatgatgcagcaccagacttgtttgttttagaaacaggttctgacacatatctgtgtgctgcttcatcatcttttaatgccctttcctcaatgagctcactttatcattatttaaattccacataaaagaacaatgcagttcattaaaggggaaaacaattttacattaaaattcaactataggcctcctgtatcttacttgtgactattgaacgttttttgcactttgacactggttctactctcagatgagatctttgattacctacaaagactttttatcacatgataggcatcatcacatctgcattaaatgaggaaacatctttaatgaatatacgaatacaatggaaaagagtaaaaaatgtacaagacaggcaaagcatatttaacaccttatgaaagccagacagaagggcaggaacctaagctccacacaagcaacagccacacattcagtgataattggtgcaaaattggctgtcatgatgatgaacaggtgaaagcactgtttcctattgaatgttgttcttcatcgaatgacattcctcttatctttaaagggaaattacacaaacaattttcatagttttaatgacagaaaacagtactaattaatgtctctccaaggtgagaaagcttcaaaacactacttgtcaacaggctctcttccatcgaaatatttggcccatgaaaaataatagcaacaactataatcttggaattcctgtgaaagaagaagagctaacaagcacactggatgacagaaataagggccatccagtcagtaagtagtactaattttgtggctacttcaaatggaaaatttcatgtcttgttagaaacactccatatctatcatttgaattaaggagttaaaataagctcctgtctagcctcttcccttcccccacctttctgcatctcctcctcccaatctgtctctgtgctagatggaattcagagccttaataggttaggctggtgcacttcctgctaagcaagagcttcagccaattggttttcatttcaatatgaaaatgagcataagaattacaaggatacatttatttggtgggttaaagagaataccatatgaacataaattaaaaatgctgtgcatagataacgtgtaattatccaaaggacaaggcatgagaatgtcatataatcttcattatactcagtcccacttacccaaacaacacccacaaatgagccagagatgctaacaaattccatcattaaaacaccatatcattagtcatatattatctccacaaatttcctaaagcattttactgggaacaataacttgagtgcaaaactgagaagagattcatcagaatttcaaagtaaaaaccctatgcatcacctaattctattgaaaacgatgctcatggcaaatttcacttatcacttgaaacatatttctgcccttggataccagaaccaaattaaaaaacatgctgttgctctgctctggcagagctgcaatgcattatgtttaaatagttcagcattcagatttagcttgcctaaagtacaatatagaatcaatataattacaaaattcaggagttgctactggaattagtatactaaaaagtatgaatgacattaccaaatgatgctggaatttacttttacagttaaggacattttcttcagtggataatgttttaaacagaaaatactttgtcctaaatgcatgtgtacaaatacagatatgtaatatattcatatacgtacatataaattttgtatgtatatatatgaatgcatgtatatacacacatgcacatagtgattttttgaaatctagacatataaagctcattacaagaatacaagagatatattttgtcatatcaataatatataatttcctacaaaaaatcaaatctgaaggttgcttttcaaagagctttagaagtgtaacaagaaaaaataaacaattctattaaaggagtaagtttttcttgttgacaataaattctttcaatgaaacaaacgtttaggttttgaaattcatacagatttgattaaagttcctggtgtttgctttcctttatattaaggtgagctttaccacacaggttatgaggcagcttacacagtttgcactcaaaacaacaaagcaaaatatgaaaaacattgtttaaaagtacatgcttcaatgtaaacttgattaaaggtggctgggctgtttgtgttttctccctcaaatctgaaaatttcatgtagcaatctgtttagtaggtagaataccagcaaaacactggaaatttttagtgactgcataaagcctctgccctcaaattcactgaattcaatcaagagacttccatactggtctcttgcttataatcatggatctctcatgtctaataaacagttcagtactgagatatatgtgcaaaatatgtaaaagtgtacacatgtcgtttccttaattggcaatatgaattcactgaggcaaaaatttaaagagttgaggtttgttaacctttaagcaaacagctaagctcattctgttggtgcctgggaattgtccctacttacagatttggcagtagcagaaatatactggacaaccatctcacgcttggtggtaaaatccttgtttcgtaaaggagccttcttttcttcattcaggttcatatcctcctattagaaagaacatctactgtgagaatggatggattgttgtgtaagcatcacaaaagtgattaatgcaattaatatttaacaacagacatattttgggttattatttactacttgagataccataatgttgtgtgtatttcacatgtattcatgatttatacttctccctagctgaactgtgagaagaagaaaactaaagaaaaattttaaactatgctatggaatactttggtggttcataacatagatgtacattatacagtcctagaaaaaccattcacttatctctacagcaaatacacacacacacacacacacacacacacacacacacacacacacacacacacacnnnnnnnnnnnnnnnnnnnnnnnnnnnnnnnnnnnnnnnnnnnnnnnnnnnngcgcacacacacacacacacacacacacacacacacacacacacacacacacactcgtgcactactctttggtccatgtttcccaaggaccactgttacccaagaaaacatatgtgatagacaaatttatcaggagatacatcgccaaagaaaaattctcagaaagttgttgtatatgaaacagaaaaaagaggaaatctctctctctctctctctctctctctctctctctctctctctctctctctctgtttctatgcattcatgtatgtatgtatgtatgtatgtatgtatgtatgtatgtatgagaaacaggaaaaactctgttttaaattatcaaccatatacatgcttcattatgaagcttcacacatgtatgaaacatactttgatcatgttactccccctctgccacttcttatctctacacctgttcctacaaaccatttactcttataaaatattcccctccttctattgtagctgtcagaaaactcactcataacttacccatttgtgtgcagtttaaggtttgctaatgttttccttatagaaatagatacaaaatacattcaggaaaattttaaaaactattaaagtcaaaagacattgactttttatgtcttcttttaaaattagaatcacttatttattcaacatatagtatacataaggaactgtgctagactgttaacactgaaaagttgagtaactttttatactcaaattaaatgctattatttgtgaagcaatggctggaccttagaaatgttatatatgttgttgactaaagaaacataactaattcatgatctaataggtacaaggaattataatggagacatgtatgagattccttgaaaatataagacagatggtaaataagttcagcaaagattttagcctagacttgagttatgaagaatgagaaaaatctgactaacagccaggagaccagttgaaagattccagtggtcatctgtcatttttggctacccaacacggtttagacatgccttctacgttttcatgcatcctcacattgtcaatttcagtttaaaaatgactccataaaaacggagtttgtctgctatccttatatgtaatttcaatatacacatgtggcttagtcttcaccaatgaaatgcatttataaactaggtgaagaaataggccaggaacaggccatccatcttgctggtgtgggtggcaacagagatgacgtagatagggagcggatggcagcagccacaaattttttacttagacagaccaattggttctggagtggcaacagctccttaatcagactatatttcactatgtggctctgcaagcaattcctataatgccatctggagtctattgttgcaacactcctgattgaagagcaagctaatatctcttaatacttagtctacttttgaacccaaagaagacagagtttatatttgtcccttgtttccttagcacagacgtgagaccaaaaggaaagaatgagagcctgtgttaacaattaatgcaggttcggatggtagcaggatttgaagggaattaatttaagaaccatgcaaatgtttttggacgtctgcattttctcgggctaaaatatacatataccagtttcaatttatgttcatgtgacatcacttagaatctatcgctaccactctcaaatattctgaggcttcttcttccccttgaaataatatacatctattcattcgaccttgaattttacagggttattggctaagcacatcattccatagcctcatattgctctggttttcatcaaaattcctatgttctctccacaagtgttggagtttttactgcctcaaacattctgatgacgtttctgtctgaaataaaagtagttacaacgaatctacatgtcccaagtacaatcaactgtgcaactgtcagaattttctggatgtgtaaacatccccacatatcctaaaagagtagtagtatcctctctccttccagtgatagctccacattggtacctccatttgatttttagtggcacgcactgcagtggtcaggccatcaaaaatggtgttgtcagaataacaggcaaggcagtaagaggaatgtaagattatatacctcagagaatgttgtcaaaattgagtatgatcatatatatcaagcctggtgtacattaaccagtgcccacagaatggtatctaccactacggctatcaattcctcaccgtcattttgggaacttcttctggcttaaccctctatgcttcaatacaaggtcggccgtgattgttccacatactatgctgactcaaacttcccactgttgttccctttgccacctctcacagtgtgagctgctgcctccagctaaatctacatctggccagttctttttttttccatttttttatttgaattagaaacaagattgttttacatgtcaatcccaggtccctctccctcccctcctcccctgcccccttcagtaacaccctacctatcccgtaccttttctgctccccagggagggtgaggtcttccatagagggtcttcagagtctgtcatatcctttgcaatagggcctacctccttgtgtcttgctggccagttattatactttaaactacactcatccgctaagctttccataagattttctggattgccccatttcaaaatggaaaccttcatcctgttcttccatactaattttatttataattaacaatttgtcagagaactatcaccataaaactctaaggtaactgaaggcaggaactttcttagctctgcaatcccaggtaagatcctggtccctggaatacagtaagcacttactaaaattttttgaggtggggtgatatttgggccttttctttaaatattgaaattgcctcagaattattagcatttttcacttatgaaatggctgcctacattggttaggaatgggtaacgttcatatgaacaaaagagtctataatgactcatttaattcttctagaaataaaaaatactactaattgtgcagctgatacttccaaatcattaactctagctttaaaatataataataaaactaaatagagcaatgcttgtaactcaatattaactctagacaacataattgaatacgaaactacttgtgaacacagttcttttgatagtcaaaagagaaagcaagttttaagcatattacatgtctgtttaatgtatcaacaatatatgaggaatgtagtgctacaaatgatgttgacatttaaatacctgaccacatagaatagttttcagcaaagccatatttgtaaattgcaacacaaataataaaaacctagagacaaatattgggattcaagctgaagattagagaagcaaagcaaccaagccacagcatctctttcctgtctctctctagacacattcctttactacctcaaatattgtttgttcttgttgttttgcttttatttcatttatttattttggtgctgggacttgaactcagaacctcatacatatacagcaatgctatattactgacctacatatataaccccaaacactgaacgactacagagatacagaaggaactatataaaaatagagtaagatgaggttaaaagttgtaccagctaaatattacttcatttaatctttctttctttctcatccctctctggttttctcttttctctgcctccaaatcttaggctagagagatatagacctttatggaaaattaattaatgtcactctagtacctaaaatatgcaagtgtcaataataaatttaattatttttgatgttttgcatttcaaaattagtggaattttataatgttatttaaacaaatgattttcctggttgtgtgggtggtaggtaagtttaagtttggttgtcttctgttttattgacacagggttttgttgtgtagctcaggctagcctagaactcataatccttcaacctctcaagtatacatccctatacccaaaactttattttctattccataattctagcttttctgaacaaaacaagaacaaatatttacttcttaaattaaaatgaaaatcagattttttttatgtcatttaattagtggccagttgacctggcagttatcaactgcctcaagttttcaaaagatttgggtaactctattaaactatatagactatagccacataacatataagagctctggtagcaaaacaaagtcaagtggacacagtgaaaagatagtacttctgaatatagaatgaggctaaacacaaaggcatacataatattaagtgaatattactaagtttcatgcacaacttcctgtctatttcttttttcaaggtcctgtcagaggcctccacccaaaatcatgtattttaatataagaaaacataactagagttttcactgtctaataattgctaattgtgagtacaatcatcaaccattatttctagagtagacagattacataaaggacccatgagggttgaaaaatggcagtcattcaaaagattaaagaaaataagatttactaatacctaacagagaatatacactagattcttctttggacccataggttgaatggtaccctaagtagtttaaatgagcagtgaaatattcacaatgcagatttatttgcagtcagtgtactacaacacactacagttaatgttaggtatatttactgattattttgtctccttttaaccaaataagccctcagaaaatagaaaatcaactctaagtgattcctataaagacaacagattgaagataataggataataccaataatgcgagcgcaagggaacaagaaaatgggagactgttagatgtcttctttgtaattcttcatcttttatccattaccacatagtaaaaataacaaaaatctaactaataaactgtctcctcaagacataaatgattaaagtaatgatttgaaatacagttacctatcaatcatgatgatgactctcactttaagtgcatattatactttaaagtcttaggcaatggtagttaaattccacctcaaattaacaaaccatttaaatcttagcagccagagcatgaagacagcgtcttcaattttctcagcaataattagaatcacatgatctcaatcctgtaccttagtgatagtgtataaacttaatggcacatgtttatgtgcctcttttgaattttcttaatagcaagaaacaaaaggccccacagaagcttgaaaacacttggtaaaagcagctgaaataataaatgcaaaacaaaaactcaaatgccttccttgtcatcaaatactgtcacaagacacacagaaatcattgcaaaagcaaaaaaaaaaagtgctaaagcaggtattaggaaagtgactcaagtgtgggtggttcactataaagctggatgaatacagatattttgtaaaatagctcatactaaaatagtttatagttgtttcaatacacacacacatcatttttcttggagtcactaacagaacaatttaacatgaaaaatatattgacaaaataaaagctgtagttaagaagatgctttcaggaacaaacaacacacacacacacacacacacacacagagagagagagagagagagagagagagagggagggggcgaggattcctgaacacacttacatgtggaaaattcaaacagtattttattttattttatttttggttttttgagacagagtttctctgtgtagttttggagcctatcctggcactcgctctggagaccaggctggcctcgaactcacagagatccgcctgcctctgcctccccagtgctgggattaaaggcgtgtgccaccaacgaccagcaactcaaacagtattttaaaccaaagtgtacagactgctatacaaataaataagtcagcttttatttacagaaaaagacaaaatttaaaaaaaaaaatcaagccagcaagggtaatatctcacacctataaatcatgcactcaaggagctacaaggaggaccacaagttcaaggccagcttcgggtacatgatgagttccaactagttttgtgtgtgtgtgtgtgtgtgtgtgtgtgtgtgttgaaacaactataaactattttagatagagtgaaacaaatacagtaaaatatttacataattatgaaaatatttctccccaatcatagtaaataatgtaagctaatgtcagaatgaccaacatatgtttcccctcacttgtggttctgaaagtttatataaatgtgtaaaatcctatatgtgcatgacatgaaaatagacttgaaactgtcatggggaacaaaaggactagtataagctgggagtgttgataaaagagaaggtatgggggctggagagatagctcagaggttaggagcactgactgctcttccagaggacctgagttcaattcccagcaaccacatggtggctcacaaccatccgttatgagatctggtgccctcttctaccggaagcagaatgttgtgtacataataaataaataaaatctttaaaaaaattgaaaaaaagggaaggtatgaaagtagggagggtaaatgctaaacatacaatctgtacttgcatgaatacttcaaaatacattttaaaaagaaagaatatattttctccctacaaacacatctctggttattgcaccattattttaaaccatgatttaggcatttctcttttaatttaacaaaatagtgcccagttagaaagtaacttcttttcaaagaacttcatgttgattgacacatattggctgacccaacttccatatcagtcttctgctggaatcactgttaattctttcttctcagggctagatactgtctggaggagacactcatgaggataaggatctatatatgaatgacacggaagtgaaaatggaaagagtctattctctaatagcattaattaaagactctctcactaaagaacatttgaacccattaatgtagaaactttaatatataacatgccatactcattgcacaactggttgtcaccaaaggggaagggaatttacttgtcctggtgaagcttgattaatggaatggattggtaagtcaatgttctgatttagtttttgctaactatctacttgatgcatttggaccagcattttgttttatgtatttttaaatgtgttttgatgcatgtatgtctgtgtaccatgtgtgtgtgcctggtgccttcaaatatcagaagcagatgttagatcccttgagacaggagtcacaaatggttggaaaccatcaagtatgtgctaggaattgaaaccaagtcctcgggaaaagcacactgtgccatctattcagccctgaacttgggcttctttgtcagcttttggctttgagtgccaaatatcaaaataaagatgtctaattgctgcctattttaaaacaagacataaaaaacatgggctcactgtcagcacacaataaaaaccatcatgaaagtgaagacttttgtctgaaaaaatatattcattggacaatctcattccttcaaggttttcacaatcttgaatatgccttcaccttataaggtacataacattagcatatgcatatattcatagttgaaaatgagacagtttgaggttacatgcagaaaaatgtatacatatatacaaatgaattcatacacatacatttatttatatatatactattcccaaatggggaagaaaaatcaaaaagcataaagaccaccgaatcattcctgaggttacaatgcttttctgtagtatgtcagtgcagggtaataagtgttttagactttcctcattaatagtctctgctttctttttattcttttctgggcatggttttatttttttattttgtttcagtttgctctggtttggtttaagtttttgaggcagggcctacgtatcccagattagccttgaattctctatataggccaggaaagcctaaaccagaattaatttttgctacagtacaaagacacaaaataggaatttaaaaatagacatagctgcattccacaaaaaaaatctcctctgtagacaatgaaattcatgtaatttccatgcaccttcaaacactcttctccttaaccatttaaaacataaagcatggagccagtgaagtggctttgcagggaaaggcactggccttacaagtctggtgacctgagttgggccctggagaacctatagtaggtggaagaagaaaatcaaatcttacaagttgtcatctaacctcctcctcatacacactgcagaatgtgtgcattcctacctgcactcacacaacacacacacacacacacacacacacacacacacacacacacacacacacactagtgtcaagtgaactcttgaactttgatgaattcctcaaacaatgagaaggcactgatgccagaaaaacaaagactgaaaattcagaatttgacactggcttttcacactttccttacctctacatctgcttctttcctgagcccccatgagaggctgaaaggactatattatatctcccactaaagcagctgatccacagctagcctcaattttagggacgccatagctacctgtctatgtgactgaactccgctctctgtggataaaagtaggtgctacatttatttctaaacctgcagcccatagcataccatctatatcataacacagatcaactcataattgctaaaatgtattcataaagaatacacaaaaaaatcccttttttataaaggtacttattttcaaggcatttccaaatgcaggccaagaaaaaaaaaaaaaagcagtggttcctgaatttgtcccactacaacatgaatttgcaaacctagnnnnnnnnnnnnnnnnnnnnnnnnnnnnnnnnnnnnntttctccttcaatacctgtcttccttctctttcgctcaggaaccttttgtgataataataatggcaaaaattaaactgatccagatccagattagttttgacatctgttttctgagtacatgccactactcctttacatgttttccacacaattcttcacaggaaaataaaatgtggagcacggtctaaaatatgggggaaagaatgtaggaaatttaaatgtaactggtggcaattgggctgtctgaacaatttcttagaatctaatcatttccgacactattccatggctttttgtagatgtgaaggcctagtttaccaataatgtattttatggaaacttaactgttattaaaattacttacgctgagcgcaatcaaaggttctcagccaagctaaccaacttctaaaaccctggtgctgagtgagaaaaaaatatcctttaacagcaatcaagggaatgcaatacgcttgggttaaagtagagcacctggtgtccagaggcaactcttcggtgtaaattaatgaaggagaaaaggaaaagaacaagattaaaagatttagatttacctgtgagaattctaacaggtgaaataaaaacaccaataattaagcacttattacatgtaactatgtcatcattaaattatgccaaagatgcaaagtacatcgatataatacaaaaaatactgtttgtaaagagcgtttgctttatgaaagaattaccgaaaagtataacatgtgagatctttaaatctgtcagcaacagacagtggtattattattaagatggtcttatgtttgctacatcaaatatgcaaatatctataatatgaaaagggatttatggatgcacagagtaaatgtgagagtcaagaaaacattcaaagtaaaagtgagtcacttaccctgttttgagacaaggaagaatcttagtatgtaccctgttggctgacatataatttcctatatatcccgagatctacctaccttggactcctgaatgctacaattacagtcatgtattgccataccagatagccctctcatttaagaattttcattaacttcaaaataaatcaaggtggttttagggggagtattagggaatgattaataataaaatagctaatacctattttgaaagttctattctgctgtaattttaaacttagtcttctaataactgctacaatgagaaatgctattggtacttttgatactcaagcactaaaactatcaattatcagaatgaggtagaataaatttgaatattgctttttattgttttccccataaattttatgaaaacattctatttctttaaaaaaaagttaaataatccattgcattagaaattgtaaactaaaccaggcattggtggtacacgactttaatcccagcactctggaggcagaggcaggaaaagccagccgggtctacagagcatgatccaggacaggctccaaagcaatacagagaaagcctgcctcgaaaaaccaaaaaaaaaaaaaaaaaaaaaaaaaaaaaaaaaaaaaaaaaaaaattttcacaggtgtgcannnnnnnnnntaaaaaaaaaaaaaaaaaaaaaaaaaaaaaaaaaaaaaagtgtgtgaaaggtgctatttgatgccgtttcagtatgtcatcaaaaatatccaaacacatcttttatactatggtgacacagttccatggtagttctggaaactgcaaacattcactaagagaaacaatagaataaagggaacatcaagagacactaaccagatcattttagtaatcatcaaataagacaagaacatttttgtttacattatttgtaaggaggccacccacaggtagtgaagaaatcacagaaatttcatatctcaaagcctacttctgtgtttcagaaatagtaacttcagtgccttctctttatcaactatgatgaagatacttcaacagctttctattataaggctgttggcctttggtgaggttctataaagggcaactgcaaataaggatctgtcatctgcagaaaatgctacatctcagaccctttctctcgtaccttatgcatctcctcaatatttatacaccaaaacgtactgatttgatatatagctttaatgaaatggtaaatatagatgtcaccaaaattccaatgttttagatttattgtgtacctaagtgtgtgtatcagtatgcccacttaatagctttagcaagttactgaaccaactttcttagtctctctctctctctctctctctctctctctctctctctctctctctctgaagctcaatctccttatttggaaatgagatcaaacaattagtacacacttagaagaacagtcataagaataaaatggcataatacatgtaaaatagtttcatgattgggcaatgaacttatagtaaacataaacaacgccgattctgaaaagaacatgttcattggaaggcaatattggtaaattaaacatagaatacaaacaaggggtaagaaaacttttctcaaagaatagatataatcctttcaaagtttcccatttatcttggttgttaactttcaatcaaacgatgtttctcacaaaagctattcctgatgcatttatactattattttaaagtagtgtgtttatttataaatgatattcacacatatatcagtgtttctgttttgctgttatcagtgatcaagacagtgtgacaaagtagtaaaatgttaagaaatgttggcaactgaacaatgatcagagtttatcagataaaggaaaaaatgctacaaatgtttataacatattcactataaatatatgtactctctgaatagatttacttacatttactgactgtaagtttttcaaacgttataaaactaccatgtacaacacacattgttcaatgattaagtcttgtgttcttaattatagtcatattttatacaatagatctctataacttatcccccatacctaaccaaaatcctattataatcctttggcaatcacctcacttttcttcctccaactatatcagcctgatggtaagctaaattatcattgtcatagaaaataatatcgtcatcatcaaactagtaaatcgaataaccaagtaatcacaccattggatataaaaacagtattgtcgatatacaagtatataatacttttatgtaggtgaaaatgatatatatgatatacaacaaattaaataataacacaatattatatttcctatgaaatatatttttgtttaatatcttcctccaaagctctatggaatgaaacaattccactagggaaaatgtagtactaacttatacatttgcttaaataaaattaatgaatccaacaagcaaattgttctacaaaaggtcacacatttaaattttttaaaaatatataatattgtagtaaatattagaattaacattaaatgataaaacatgattatgaaaggttataaaatagttcatatagtgctcacaagttacaaattattaagaatcactattgtatagtgtttcaagcccataaaaggcatgtgtgcaacttggaggaaagtagtaggaatagaactattttttaaaacggattgagatacaatatctctatgaattgcatgctagttttttaaccatgatcctcctccctcagcctccagagcattgaaattacaggcatacacaatgactccaggcaaaacagtagctatacaccgaataaaatggaaggggggaaagatctaagtaggtaaaaaaagaatggcaactccatgtatacacacatataagaatcggacatgaaaggagccaagacgttgctgcagaaactcgcagaaacagttgacctgacctagtgaaagcatggagaccctagtcataaaggtggggagacagcactggaccaagccaaaccctctgaatgtgggtgccagctaggaggccaagacagtctatgggacctctaacactggagctagtctttaaccctagagcacaaatggtctttgggagcccattccctatggaggaattctattgcaacccagatacagcaaggagggtcgagaccctcccccaaacaatatgacagactttgaaggtccctggtggagggcctcactatcactgggaaggagttgggggatgggttgggggggttgtggggaacttgggaggatgggagggatggatatgtaaatatgagtagtaattaaagaatttaaatataatataataataataataataataataataataataataataataaagaattggacatgaaaatttcatccatggtaacaagaagcaaagcaattagtccagagtctaaaagcaaggtacatgtggtagtagaggcccaagaaaattcccttctcatccttctattttatttcatcaattaagcagagaattaccagaagggttctaacatttctggtaattaagacgggacactggaatcggaaacaggaacaattgagtgactgagaaatattaataatacaagatagactagggtttgtttgacaaaggaagggatgctacaaatgttattgtagtctttatataaaatgtatgttgatgtgggagatgagaatgtttggtatctctaaaagagatctggtcaagctaaccaatgtgagatagcccaatacttcatttatccctgctccagacataaagtattgaataatccaagtattacatttattattttagaaataatagaggacacacacacaaagaaaaaattaagaaacaccctacaaactgtaagttgtatgactcttgctgatatgagaaaatagaatgaattaattccttggctccaattaccattttgttgtttattttacactctgccttcccaactatatttcatctactcaacagatcatgtagacttggacacatgttgctttggaccagcaaacacacagattatttaattgaaaaattgatttggtgtgccacaaaccacaaaatactacaagacaaagaggaataaacccgtgtctgattttaggcactctgactagaacagataggcattctagcaaataaataaacaaacaaatccaggtactcttggaaatacttttgtttttttaacaagagttggatctgtcttttatatgacataaacagtcaactacaaacatccctatttaaaatctattctagacatacacagtttaaaatgacaatgaaattagaggtcgaactcaccatcattttctcaaaaaggtccagaacttccttttcagacaaattcagagatcgttcatcatataatggctgagccactggaaactcactcatcgagacttgagaatcaataggatgttgaataaaaggtttttcttttttgacagtagattttctgaaacttgtaattcgatcacgctacaaacagaaaaataaaaagccctcagaaaaagatcaggagccaggcacattaagaatggaagcatcaaaatggcacttagtatgttatctattgttattctcttttgacaaaacattattgtaagcagcaagctccagttagagattggactgtttttgcaaccctgaagtcattcctaagcttcagaaagctgggggagaaaaaacatgcctcaaaagtaaaatttagtcacttgtcatttctgttttacaaggaaggaagtgaagagacactttggatcaaaattttgtggtggctgtttctgcatttgttggaaacgaaaacagaaataccttcctcctccaaatactattctgatgtgtgggtatttcctttaaaccactgataccatgtacaatctctaacaattagcttgctctttcgtatcaagtaagtcaaggactttgcttgcaagtcaagaggatatttggtttaaaagccatcaaatatctgacatcaaacattagtaatattcataaaactgaaggcaactcagttttattctggtgtctgttaggaagcacatgcaatatcaagtcacattaagcaagcagacatgttagctatgaggacagtggaggaacactgccacatgaccacacttcatttaagtaacctttaagaatacaaaaacattacagacatcactacagtttatggaaaattttgttgaccccccctaagagtacatattcttcattttattgatagatacaatgttttttgtaaaaccataacgtgtactttgaaaaacagcagttttaagcagcttagttaggattacaaaaattatttgagtatgtggttgcttacagagagattatagaaaccacaatagtttggaggtgggaagaaaaatgaaatagcatctaaacctacttcctcaattcacagaacaggtgactcaaacacaagagaccatggttctgatctcagctttcacattacaattctttctttaaaattatttgaactgtattattgggttttactgtatgtctttgagggcagttaagttggtttacataggtagtgtcttccttcccacaactcaagaaaaacaattttagtaatcccaaataaactgagtcaaattttacggaaagagatggtggacatgaaagcatttaaatatgcagttagccactcacttcatatcactgaagaatacttatacagtctaagcttctgtactgaatatcagcattactaacatatagatttgctatttctgtgcccttcactttaatgcaaaaactgcctttgtctttcagctgtatttgggtaagaagatgaagtcaagttgtatactttcatctccttagagcagtaacattattttacatcttttgttgataggtaacttcaaacagacaaaaaaatgaaactgtttaaaatattattcaagaaagtttaagtaaaaagagtacatttaaatatttgcttacaacttttagtaagaattactattgtagtctgagcttgaaaatatatataagcttttaaaattcaataagcacatatctaagataataaacttaatttatttttgaattgtaaacaatttcctccaatattggtatttaatatatccacaatttatttggctatcaaaagagaaaatgtccaggttttccagcgtccacctttatgcacaaaactttaaaatattgctttggtatatgttacaaagataaagaaataattgatctgggatatgacccagctgtttatgtaagtttagggcagttgtttcattttattgaggaatggtgagacactacttagccctagctgacctagaactccttatggacaccaggctgacctccaacttgcaataatcctccttcagcctttggagtgctagaattacaggtatgcaccactgtgcctgacaacaactgtttatgttaatgtgtgaaaagggagaaattgctctattggcaattatcctattctgttctattttctaaacatccagtcactttatatgctgcatatatcaatgctttaatgtccatttttaagtgaaaatgtaacgtgcataagcaatacaataacatgctgctcactccaccttaccacatcatctgccaaagtttttatttgaatgttctattaaaaccaaaaggaaacaaacaaaagaaataacagtcagataaatgaaattcatagatcaaacaaaacaacaatgactgaagaaattaaatgcttctcatcttttacaaaatgtacattgcccaaaaagttacaaaattcaacattcaaataatacaaccattacaaattttttttaaaatgtaggaattacaaatgaagtttggattgggggaaagtaatctatttgtttttaaatatgaatgttaagattcaccctttcacgtctggctcagagaaaactacaaccatgctcaagatgacagatgactcagtgaaattatgtttcttgacagtctttgaacaggtttggcagtgaatattttcttataggtgattaaatgaagacaaaaaaacagtaacaatgtcacatatagccaccattagagtaaaatattaaaatataacaaagactaacagttcaataaaattcagcattcaaaaggtttttcaaaatcttacaatggcatacagtcagtatgaattttagatctcactacataagtacagccacatatcacttcatgatgatgacatgtttctagaaatgcacagtaagtgacttcatcgttaagtaaacatcaaagagcaaacttaagcaaacaagaatgtcattagatgatatactattacaggatcaccatcatatgtacagtcccatctctggctcagactcctcatatagcacatgacagtacattgaaatgtcctttaattaatatatgtatattaattaatatataaaataattaatatatatatacatacatatatatatatatagagagagagagagtgagagagagaggaaagaaccattccacaatggttagaaattgaatttagtccttctgacttgtttcataatcttgtttcttacagaagaagctgaataaagtatattttacatggtcatggatgttggcatgtatttttactaagtaaaatacagtgctttcactgcagagaatttcattgtgagttttcaataagtcaaaactgcttggtctcaaaaatctcaggaaattgcctacaattactattatcctctctgtgctattaaagataacctttccccagaacagctgtggcaaatgtactagtgcatgcgtagaattttttttttgtatgttgaattctttgattctgtcaggagtttaaacttctaatccctgtactaaatcatcataaaccacaaccagtctttattgccttgaaaaaagaaaagagggggttggaagatagcttagtatgccaagcgctcactaaacaaatgtgaaaacctaagtttgaaagccactttgcagtcctttgcatctattatcccagtactctaacgataaaatgacaggcagtgacaggagaacccgtgataactagtaggccaactaaccatgcagcaaacaagataaagaggtgtgggcccagaaatacccaaatatatgttctctgacctcccttcatccataacatgctctagaatgcatgtatacacacagatacacacacatagacacatgcatgtgtccacaaacatacacacatgtatgtgcccacacagacacaggcgcccacacgaatgcatcatccataagcacaaaagataaaaatggagattatatcaaaactaaatcaatctctaaaagattaattcaccttagaagtttatgcacaaaccatttcgttttgagtttttatggtgggttacagaaaaccttcatgcatggtgataaagttgattcctagtaaagcacaattacagacctgaagtgaccctgctaacatctgacatgagcctgtccatctgggtttctgagatagattacataactccttaaacaacttctgctttccttttcttccattccattggggttataaagttatgattggaaacttctatatctccaaaggaagaatataaattagaagaaaaatgatttgctttagtcaaattccctaagttaaggtacatatatgccagaaatgcttcagatctgtatctcaattgaacacatgttgacaatttaatcagtggagacaaacacaagaaaaattgaaatgctagctatcttttcacttggtttgacaggaagaatctggaatcttctcacaattctctgattttgagttgatattctttttgttcacaataaaccacatactatggacagttaaagttgggtggaatttaagataatccaagcaaaagaactaattttacaaataagagtgtaccatttgtgttaatggtaccactgtattccattggtctatgttaaagacttctacgtatcatcattcttcatttccaatgccctaaagactaactgttcagtaaacacacacacacacacacacacacacacacacacacacacacacacacacacacacactaaaagtctacttcaagccaccatcagttcttacccagatttccttagtaaccgcctatcttgtctcccttattctagctttgctctcttacagtgagttttgaaaagggcagacaacattatactgtgaaaaccaaagtcatgtcactcctaagttcaaacctgcaatgactctattttcctttccaatgcaattcagagtcattacgatgactacaagacccatgacctcatttcttactgcttccccttcattcaactagcttcattcacactaaccacctcactgctcccaagaaaagcaatcacccacaggaattcactcttccctctgcctgcaacattcatttctgttatctgtaaaacttgctccttaatcctcctagcaatgatttttttctcagtgaggcctactctggtaatactgttataggaataatatgggcctaatccccacattcccttgtgtttttttttcattcttcaaataaaatctaatataccaatctacaatatattgttattcattttctgttggcttttgctttgttttctctagtgctggggatgtaacccatggctttgtacatgctaagcaatcgtttttccactgagcttacagccccaaccatttagtatctcttctgctcactataatatgagctgtataaggacatgatttcttctctgtctagtttggggctctgtttctgatgcctaaaacaatacttggtacactaaggctcaatatgattatgaatgactctcatattccattttataaatatttaatgcctcatgctactgtaaggactaataacccaaaggcattcaagctctgaatgacttggccccaggccaccttctacttcttcccttctgacccctgtactacataatacaaaaactgaaatcttttgtgtagtgcattcctatgatgtcctgtttgtacttttgcacatccattgacctggaatattcattttagaaggacatttctaaatttctatttctatttctaggtgcctcttaaatttaaattttgactactggcaaaccaaatgtggaaccctggtaaaataaaactggataacgactctgctctattttattcttgaagaatttctccctaatacgtattttcaagaatgatagagcaccccaagggagaaagcaaattagatacacttaaaaaattatctcaattacttatgatagagagccataaagaaaaaacactctgctcttgatttcttgatttataaattttattccactacacaaatacattctatataaatgggcgcatttactgtaacatggttattttctaaaatatttgctttcaagagctagaaaaaaggctcagcagttaataacacatactactcttgtagaagatccaagtttggtacccagcacccacatcaggaggttctcctataactccagctacagaagagccaacaccttttctgatcctgcagacacctgcacacacacatcagacaatcacacaaacatatacatgcatatgcacataaaaaaaataaaaagtagttataattttgacttgacaagtggcatatttcctaaatataataatatttaaaactttccgttaaattgtgtgagggaaataaccatggtatgctaaagaggaaaatgtttagcagacacaaagtacctgagtttcagaaattgtgatttttcatcactgtatacgaaaatgtgctgaaatcatagtataagtcacaaatggtcatcaatagaaaataaatgatttctgccacatgactgaacatcagtcaaaaaacgacaccaaacaggaagttcaaagaactgtaaagagctgttttggggcaagtttaaagcaatcatgttcatatgaactgatctttctcttttttgtaagaatattatataatcagtgaaggtagggtattaatgagttcactagacccaagataaacgataaatagctgttttattttggaacaaattacacagataatagtcaagaaccaccgtggcatccctctccagaaaagatgtgagagcgagcctaccctgtgctctctaccttctggtccacatattaactgatattaaaaacacattttaaaattattgtattaaagtacaccttcatacaaccaaccatggtggtgcacacctctaatcccagcattctggaggcagaagcaggtgaatctcttgaggttgagtccagccggatgtgcatagcaagagttctaggacagcaagggatacacaaagaaagcctgtctgcagtataatacagtggttgagcattcaccgaatatgtatgagagactatgagttaggccctcagcacagaaaaacattattttaaaataaatagacaaacacttcatttctaagtggtttttaagaaaaagttctcaaatcatttctgaatttactttatatagactgaaatatctttcccacaggccatggaggtaaagatgtatcttacttctttgtacaaagtatagatctatacatatacatagaattaaaaaattaaaaaaaacgaaagaaaaaagtgaccccccaaaaatggaatcacagtcttgaattaaaagcactgattaaagtcattttggtaaggttttattatgcaaatctaatgataatggtcattacagtacatattacatcaataagtatagtgaccatatattttcattaaattcaactctgaagaagcaatcaaagtacgcattagtcaagcaatcagagtttattaaacttcatttatgatgagctatattaaatataacagtgcagtattttatagtattatctaattataaaagtattgctctagagtctcaaccctttaagaatacaagaaatggtgaacttacttataaactctaatgttgaagttctgattgccatacaaaagatcattattgcaagaaaattaagttttaattttctcaatcaggcagaaattaacaaaagcagcaaaatgtaaagagtcaactctctcatggataatgttacatggaaatacaatgctttataaacattgtgcaattagtctagcaccacagaaattggacaactaaattggatgcaattcaaaagtctcatcgtcaactcaaaaactcaatcactgtatttgacaacttttttctcttttaaagaaaatcaataagctggccattacaacaaagatgaatggtcaattattcacccagctttaagtatcttgctctccaaaagggccagggcaatggaacacagaaagacacattcaaatcaatataacaaatatttgaacatctactatataggttctagttagttagtgatcagaggattgaaagaacaatcacaaaaaaaaaatgggaaaggggaaatgccgtgggagttcagataaaggagtaccttggtacagactgaacataattccaagttagagagaccttgaggaaggggagcaagagagccaaaatccacccggcagggttggattcctctacaaggcgtgtctgcctaattcctatctatccaaattggtagccgtcatagaaggaagtagttctgccttccaacttttaagattctatactctgaactttcaaagctagcaaaaccaatcaaaataattccaggtcatttgaatacctagtaatcaaaatcaaccttctgagcaatcactgaaatccttcatggagattgtgttagtttagtatctctctgatctatttatttcacggagaaaattatctataatctgatttttagaagcaaactcaacgtagatgtttgcttctaggatgacaggagaataaattttagctttcaacatcatggaaatatttactgcctgtatttaaaattaccctcaattattctttcttctacattctaacataagggtcattttccaacagaacacatcatgtttggcaatattgtcctccatcacaattagcatttatgaatagatgctaggcgaactggcagcatgctaagcactgaaaatttaaagaggcatggccctgctttcaaaggtcaaaaccctaacagaagagaagatgaacttattgacattaagctccaaatatcttccctactttggtggctaatgtctataaccatccatttcttcatttaagtagaaaatatgtttctatatttgttacagtaagcatgccatctcagaaatattgtcaagttgaagattcaaactttaagctgccagaatttttactactacaaataaaaattctttctgtcattgttctgacaaaaaaaaatccttctgggatctgctcctcaagctgttctttcgttgtagaagaataaaatatttatatataggagatcaaatataacatcaaagtccagagcttcagttttcttcatgaagcaaaatactggtactgtattaaattagtattgttcgtctgtcctaacaagatatgagctcaatgtgaaatgaaatgtaccaaacttgaccattaaggcaataactatagtatgggaatccaacagtctcttccattgaataagcacctcaggaaatgtatgctggtcacttaggtgttcaacaaaagctcctaataatgaattagtgaaagccacttaatgtctaaattaagcaaaaacaattgcaggaataatcaagctttttataggaagagctgcttctgcaagcacagaaattacatttgtttgctatgtactaaatctgagataggaggaagaattcaacctgaagggttttccttcatgaactatgaatttaacaaaaaacaagactagaaaaatctagccttacataaatacagatattccaatctttcaaagcagtaattagtacattagattacacttggatcgatgtgttggccaaatggggagcaatgtttaataaataaaattttacctgctctgttaaccaatggatgaatgaattgagcaaacattaagcagttacccattattaaacaaccagtattgtacggtatatagaagtataagacatgactcctcccttaagacatgtgcagtctaaccagaagttagataactaaccacataaaaacaagacaataacgaaatactatgctctaaggtatgcagcttttccttccctaccacattgtcctctaaaatcaagacagcattgtgtgctatctgtaagaacttgctcacaatttacatgttgcattctacttactagcaaacaatttccctcccagcagagattttgagagtctgcttagctttctaatcattaacactttgaacaaccattggcacctaatacctattcaaatatttggtggataaattcttttaaggacaaaaagaatttaagtataagaggaagaaatggtttaaccatttctgaagtgggtgagaaactctgctaagactcacacactaatccctgggtaggaatagtcatgaaaggggggaaagggaaggaagtcagacacaagagggagcactctgtgcttcaggggacttgggaggagtggccttaggaaacaaaaggttcaagaggaagggcattacattttcaagatgtgactctggtcagattagagttactcttgaaaaccacaagcggtaatctacaaaacatttagcaaccctgaggggtcctaaggacttcctgattcacagaaggatattggagaggtgatgattttaaaaaagctaaatttgcatggcgtggatccagtcttctttggaattttggaaccaggtctgttttggaattccaaataattcaagttttgagaaacatggttccatgtacaacaaataacaaaatatacccagaaagacccacagtagcatactgaattgcattcaagttcagcaataaaacaaggatgttctaccaaacaggaaaaataccatctacatgcagatttaagtaggccaagttttacagccaaattataaaaggccattttcagagtttacaggttttagcaattcagatgatattctatgatattcagaactgactgaggaaagactcaaagacacaataattagcaagcttggtcttttctatgtatgtaacagcaaccctctactgagtgtttattcaatctaggtataatggtaagagccttatatatgttgcttcatttaaacccccacaataatgatatggagaattatttttctattttgcattagcatttttaattagcatttaagccatatgattaagattccatactctgaaacctcgatctcattttgaagactttagtaaaccgtatggattagtataacactcctggttaaatcttgagcttgtttgtcagccttggcctttccctggcctctttgctagacttaataggccttattctacatcactgctctttcatctttagttggccatctcccattcatcctttctgctcttagctaaggttattgttctcttatagtaagtgacgcatggttgctgacctctcccttttgtaattatcagattacaattattccttattgccttccttgctatactggaaactcaatgtgctcaggactaaaagtctgtcttccacctctctgcctatagataaatctctacccatatctctctctggttctttttgtggtttttactgctgtcatttttttcagtcttcctgtgcagctcaagcttgtctcaaacacacaatccaatacccgtgcctcactctccccaattctggatttgcaagcacacacaagcccacccaaactcacgactagctctcatccttctttgttcccaccttatcctcggggattttacacagtagctagaattgagtgaacattcagatttgtaatgactgatggaaatgggcctgggaaaaggagcagtgatggaaagaaaacgagatccaattgttatgataagagctcagattaggtggtagcaaacggaacagagaaagctgttagtatatgtaattttgtttaaaattacccttgttgttgaagcaatgtacccagacatatgattgttgtttgtattaaatagagtaatttaaatatatgctgttgtgattactatctttacaacacacaaataacctctaaatggctgtgattactactactagatacttcaccttacaacgacttgccatgcatctccttcaagaagcttttataaataaccacatcatttagttttccgatatagctgaaaaattaatctgacaaaacaaaatgatttactccttcaaagcttcaagagtataaattgcctaaaactgaaaattatacctgaattttgaatatgttattattaaacctaattttatagggagaatgcataaaattcaaccaacaatttaagttaatgtcattactagtacttttaggtgatatttctgaatttcctaacaatccacaattcaggaatgagtcaagtctaaaagtctgtttgttcagttcaggtttttagcccttgggaaacacaaattcaaaggtgcaactcaaagccatgttttccatctaaaagcagacctcttcagtacccagaaagccaggcagccttttcagactcacacaagaatttaaaaagagaatcttagaaaaccaacctcagaacaatacattgccaaatattttaaaactaagaagcttgaggaaaatatgatgatatgatagccaaaagtaattcaattttcagaaggctaaaaaaagttttgcaagaattcagtattttaaaaatgtatacaaatatttatccttgatttttctcatgacaggctacagattcttaactcaatagtggtagctctgttaaacacatttgtctaacactgagtcttacttctgaatttattttcaatttttaactcagttttaatttgcttaaggcattcacttctgagctaccaagagaaactgtcaaaataataaacagcatataccaaaaatgtcacttaaactactatgatttacaaattccatcatagagaattaccagatagttttcattttggacatgttattatattaggcaaacaacaattgaattagtgtttactcatacaggtcacaaatttcttctaaacttgtgcttgtcaaaatgaactcttcacaaatttggatgtttgcatatagaaagataataacagctaataaaacagcaactatacctgaatttcaaggcatcatatgtagtctagtcattgtataaaataaaaagcaatgacctgcacatccctttgtctgtaaaacttcagaaccaaagtgataacacttacacatttatggaacaaatcaaatgacttcagtatttttaatactgtgaaacacttaaatgctttagtggaaagatattcaggctgaaaactcaccactcttcttccttgccccctagactttagaacagtggggttgtttatcaatatattgaacacagtttagataaagccagaaaatatgaagagtccattaaccccttccataattcttgaacattaccgatgccaacaaaggatttcaaccagaaaagcaagctttaacagggatgtgtatcatatatttgcacctagcacttaatccacattaaacttgctaatagtactctctctctctctctctctctctctctctctctctctctctctctctctctgtgtgtgtgtgtgtgnnnnnnnnnnnnnnnnnnnnnnnnnnngagagagagcttttaatgcaagagaaagtctaacttctccaggataaatttgaaaagttctaatcttattttaatagcttctgtagactttcttattttcttcaatgccaaataatttggactgataacagtttggccaattaggaactagaaggttgaacttaaatgtcatacaactgatagaataattaacagtcagtgtactgaaatgaaaatataaatgtgcttcaacatttacagaatttctcttgctgtgttatcttgagttttggccccaaattaatatgccagaaagacagggatagccaagaattttacaaaatacctaaattgacttctcaccattataattctagtttctaatatggaatacttactctatataaaatgactaatttaatagccataatcaataaatactacagaaatcctccacatacataagctgtttatagccatgagatttgcagtagttctatcgctgtattttcctacagaaccaagctcccaaatgatggttaaattcacaggtcaacttcatattcttgcacacacacacacacacacacacacacacacacacacacacatgcacacacacgcactcgcacacacacacccctataatacacctgcagattaatgaccgaaggagatccaactatgatgtcctttggaacattatctatgaaaaacgatgaattagaatcaggttataaaaatgcttttcttcattacaggcaaggttgggtgcactaacaatggtccacaaggagacagaagaaaaacaactggccacttatttcaagtcaaagtattcagaaagcgaatagaagaagacacactccaaatctaggaccttgagtagctgaaatgagaaacggggcaatgcaccccttctattaaaggaaatatcctgggatctaaatgcctttataaaaactgcctcaagagtacttagagtgaactctttcaagagcttaagtataaatttgatccaccaagttaaaaggctgctgtattttcagatatccattgaccttgtaagatctaaaatttcataaactatatacaagcccactgctacttaaaatggtgagcatttatcttaggaaaatactaaaatgtgctcttccctttttaatacagtaattgaacatactaaattaagcactttttcacatgaaatacagaaacaagactacatgtagacccaaagctacagacaatacccacctggaatgtgtaacttagactttgaagaagtagcagtttcttaaaactttaagaaatgtggcgtcaatcatcagtagctgacaaggaccagtgctttggcgaaggcattaaagagggcataaaataccacaaaacaaccttttattaaccccaacaccctggttcacattttactacaatatttattagagtatataacttccaactttaaagtagggatttcaagttagaactgagtcttatactttggaatatgctccataaatgggttaaagatggccctccatattgatcaataatgacacatcacctccacagtacataaccgcatacctaaggttctttttcaattgttctaaatgtctcacccacaaaacaatattcagcaatttagacttggcctagttttcttactgcccagtttcaatgcaaaaagtcaaataaatccagtggaggatagaagaaacgtagggagcaaaggaagtgaaacaggagatgaagggagacggatcaaaaaagacaatgtacaagacagaatgaagaaaaggaaagaatgaaggaatgagaatcgctgatgttataaaaaatctgaagggcaataacagggaatgctatttatttttaatttgcatgctcaaatggagggtggaggaaagttagtgaaacctaaagaggcaaacagcagcagtacgggtactgagaattaagggtcactaagtactgggtaccaggcattattgttagggctctaatttaattcctaaagtacatctgtaatgtagggactacctctacttgtggatagtgaacatatgcacaaagaagttaaatcaaaccaccttgggtaacattccctggcctgtatacaacatcaccatgtcagccaaaaacacaccatcacaaaaagcatagcaaataccatagtatggtatatagtgcaactcttgactgcacagacggaaactcatcagcaccggaacagttactagattccttgcttagaaggaaactcatgtaagttcccaccctactgtcttacaacatttacatagccgatttcagaattcaagcaagggctatagagcacaaaggtcgcatgcctagaagattgcttcctatgaacttagcttgtgtaaaactgctgttggttttattttctgacccagacctttccattacttttaaatgaggaagttgggaatacctttaatcccagtgcttgagagtggcagatctctgtgagttagaggacagcctcatctaagctttgagttccaggacaatgaacaaaaaactgagatctgagttctagctcttataatgggtggagagatgaaattcttttgtgggggcttagttttggggttttgggttcttgagacattctaaactagccaaatcattgttaagattacaaagacacagtagtcatttcccctaagaattcatccaacttgacttatcaatcatctagtcaggaaagcactccctgaagatatgtaaataaaatggaagaaataactatgggattaatgggatatgtacttacacaacctagacatctctgcatccatggtgatgcttggagaccttgactcctaagcctgcttacttttctgacctctaataggaagagtctaacttttctttaaccctatttctctttggaatcaagcccaaatcctacggctacttatcttgatgctctgctcagcatgtttttctctctgtgtctctgtcttttgttgtctctgtgtctctttttctctctgcctcctccctttctctccaaagattcccacttgctatgcagttgcttacagatcttaattgctctctgttttctgagttctacatcaaaagtagatgtaaagggggtaaaaggggtaaaacttttccttttacccctttctagtttctcttcggatcctgcttctgctcacaccttggtggtccatactcttcttccaaaagaccctctccctcacccactcagctgctcaaacactttcctgacatttttttcagatggtaataaatggatcctagctcttccttctggattgttgtattaaagtcattttatcaatttgatcaagaacccataaaaataaatctgtaacaaaatgaagtaatctgtaagaattaaaaaaaaaactaaaatgtcttctagagtctacatactatatagtttaatctttgtagagtttccacagggaaaatactgaaatgtaaagcaaatcaggaaggattacttcagaaacagccatctgtaaccgagtagttcattgcaagttctcaggaagtaaattagccaggagtaaaacctgtcaaactgatagaaacttttctgccaaaatccatgttgatgtgactcatccagcataaacataacatttcctcttactgaacagtgatttggattttcttctgccttctcttctcacagccagcatgacgaatgagaatggtctagcttaaagccacacagtcaacataatctaagcaaactgaagtatgtttgaaagtcttagagttacatatgagttttctacaatgatccattgtgaaaacatctcaaacattatggggttcagcaaaacatgcttactaaaaggataaactagaaactgcttgtcaggactgacttcctgtttctgtgctctgcagtaatcccaccccatctgtacttctgcttccagagtttctgctcaactgtagcaacaaaatgctaacattcaccttaacactttcaagaaagaatacattcacacaacttatattgtagtatgctgatataattattctactttattattagttaaccttactggacctaagttgttgaccactgtctgttgctttaggcatttactggtagccttgaagtgtgttcctgtgcctaaaggaactaaagactggaaatatttttacaagaagagagtattgcaatcagcaaatacaaaggaatagataccattttatgacccaagagagaaaaatttgtaagaaaaactattttgaaatctgggaaaagatacatgtatacagtttgtatgaataaaccttaagttttgtaaagaaaacaatcaaacaatcgccaagtatctactgagcaaaataaggtgagtttgccacgtggcctgtatggacattattgagctgccaattttcaggtgaatcccaaagattatgctgaagcctaaacaggaatgctagaaagtcttggtgaacagttttaaaataatttatttattttttaagttccattttacattccaacttcagttctccttcccaccacccattcctctttggttaactaagagaatgataaaaaatatcaacaagttcatttagctacatcaaccagttcaattgttgcatcaaacgggttgtttaaaaggcagatctataactcctagtactataggatttaacatacaaatacaactaacatgcatattcaaaagaaaaatacataaaacagacatacttttttcaaaaatgttattacattctattgattgtatatgtacatatacatatacaattgtgtgtgggggggcacatgtttgccatggtatttgtgtggagatcaaaggaaaacttgcagaaccgggttttctccttcttccatgtgggtcctggggattgaactcatgcttcaaaacaggggattgttcaggcttggcagccatagcctttacacaccaagacacctctcctggcccagaagtaaatattcatgaaatgatttctcacctaatggacaatagacagcataggacagtgatctttaaaagatagtacatacaacaaacagtaatagaaaagagggagccatgcagacaaaacaaaacaacccatagatttgtggaaaatctaccctgctactcagcaacatactatcggcacatgtatataaggcaaaaatctaggaatatgaaaattaaaggaatcaaaaaatgactagcacttcacaaggaaaaatacacaaaatctggcatccatttaaagattgtcaatccaatttgtatgtggtggctcacacctgcaactcaaactctagggagacaagtcagaagatggccacaagttcaaggccagcctgagctacacagcaaggccctgtctcaaaaagtgaaaatcaccaagtcgtggaccattatcccttaaccctagattgtcaacagaagcagcaagtttgaggatagcctagtctacatagtgagttccagactaaccagaactacatagtgagaacttgtcttagaaaacaattaacctatatatgcatatataatatgtgaatatataattttatacataacaaaaatatatactataaatttttatctgtaaaacaaaagttttaataaatattaatgcaccaaaaaatggccatatttgtggtaaagtagatctataatgagaaaagaaaatcaatgaaatctgctccagatattaaaattagtagactaagcattaaaaatttttaacttgtcccacatgttgggaattttaagtagatcaatagatgggagggggactagagaggaaaatcccaatgtctaagcaaaaaattcagttaaaggactaatggcaaatagacattagagatggccaccagaaaacatgtgctacagaaacttgataagatgaaacacaaaccatacaaatgaaaatgaaactttaagcatgccaaaaaataaacaaataaaatcccaaggagcaaaaaaagacaagaagatcaaagataattaaaaggtacatcgaccataatttatacaatttgattaaaaagaaaatatataaccaactaatccaaaaagcacaatgcaggccagcagagaatgctaaaccaaagctcattgtaatcaaattgctaaaacctaatgacaaggaaaaagcattaaagggactggtatgtaaaagatgaaagactataaaccttactataatactaataaaaaggtcattgtagttgtgtcagacaatgtagcctcaacaacaaaacactacctggaatgaaagaaaaaaaatcccataatgatataggggccaactaatcaggaatcagaattaataattctgatcatttattcctgtaaatgaaacagacaaagccacgatagcactcaaaaatattaagcttctctctcaacaactgatagaacatggaggaagaaagttagtaggaattgggagccagaaagcaagaagacagagaacttgaactctcaatacaaagcaatatgtacccctctcaagtgtgtatggttcatttactagaaattacaacctcaatgaatgtcaaagtatttaagttacagaaagtgtattcactggccacaaaagaaatgtattagaatggagaggatgccattgatgcccttcccctataatgagattgatgtctacctttcctagagccttcattcagtagctgtttgaagcagaaacagacacccacagctaagcactgaaccatactactggaatcaggttgtgcagaggaaggagggaggagcaaaggagggatacttttgcagcccagatacagcaaagagggcctacgccctcccccaaatgatgtgatagactttgaaggtcccccttggagggcctcactatccctggggagcatttgagggtggattgggtgtttgtggggaacatgggaggatgggaggtcaagggaatggggggatggatatgtaaatatgagtagtaattaaagaattaaaaaaacaactctgagataccatcttactcctgtcagaatggctaaaaccagaaacaccaatgacagtttatgctagagaggatgtggagaatggggaacactcctccactgctggtgggattgccaacttgtacagccactttgaaaatcagtatggtgattcctcaggaaaatgggaatcagtctaccacaagatccagcaatttcactcttaggcataaacccaaaagatgtacattcatacaagggcatctatctgttcaactatgttcatagtagcattatttgtaatagccagaacctggagtcagcctagatgcccctcaactgaagaatgaatacagaaaatgtggtacatttacacaatagagtactactcagtgggaaaaaacaatggaatcttgaaattttaaggcaaatggatggaactagaagaaaccattctgagctaggtaacccagtcacaaaaagacaaacataagccttcatccagtagctgatggaagcagaagcagacacccaaagataaacactgaattgaactcgtggaatccagttgcagaaaggaaggagtgatgagcaaaggggtcaagaccaggctagtgaaacccacagaaacagctgacctgaacaagggggagctcatggacacgagactgacatctgggaaacaagcataggactgatccagaccccatgaacatgggtgtcaattaggaggcctgggcactctatggggactctggtagtagatgagtatgtatccctagtatatgaatgaactttgggagcacattccacacagagggatactctctcagcctagtcacatgggggagggtctaggccctgctccaaatgatgtgacagactgtgaagatcccccgtggaaggcctcaccctccctggggagctgaaaggggatgggatagggtttagtggggggcaggggaggaggggaggtagagggaactgggattgacatgtaaaaccaacttgtttcaaatttaaataaaaactagaaaaaaagaaatgaaaatcaaaagatttgggggccacaggggtggctcaggagttaagagcatatgttgctcttgcagaggacctatattcccttgccagcactcacatgatggctcaaaactatcatgagctcaagttctaggacagtattcccgaccttcctaatgctgaaatcctttaagatagttctgtatttgtggtgaccccatccatagaatcattttgttgtaacttcacaattataattttgttattgttatgaatcataatatgaatagctgccaattatcttaggcaaccgttgtgaaaggttgtttggcccccaaaggggtcatgtcccacaagtcatgaaccactattctagaagatctgatgcccacttgtggcaccaagtatgttcatgacacatacataatatacttctggaaaatcccaaaatatttataaaaataaaacaattctaataaataactgataaatcaaagatgaatacaaacgagaaatttgaaactaagtggcaataaaatcagagtataccagaactgcaggatgccacacaaacactaggaaggatttagagcaattgatctcttcatcataaaattaagttctcaaagacctatagttgccaccttaggcaaacaaaaacatcaaaagaaacagaaaaattgagtgaaaataaaaccactgtaggaaaaatgtaaaacagttctttgaaaagataagtcaaataattaagattaaaaggaagaatattgtaaccaggttttattactgtattttactaaaaatcaagtacacagaaacttccaaagtcctgagaaaactgcaaactgctgattcttggtacatgaaagggaaaatagaggttggaggatttatcatgggcatagcatatctaagcctggggcatatgtttactgccttgactatggagacagttttgcacatatgcaaaagccagcattatgctcttcttaaatatttttggtttattgtatgtcagtttttgtggtatctaataaacaacaacaatttccatttacaaggattaacttttaatgcactagaatatacaaattcacatcacttgttccctctcaaattttaaaactatccaagggggcagagtgtgatggaagtggctttctcatattacatatgaaagtatttatatctagactttactggggatactgattggacatatttgcagttaatatatgggttaattttttataatctctaactgtactgagttgcattccttgttttagcaaaatactaatatagatttttatgccctaacaaaacgaaagtgttgtataggtgacccactgtaaatgagaaaactccaaatagataagccccttaggttgatcttttggttttagagcaatgtcacaagagaaaacatttgttaaaatgacacaaagtgaaaaagaggaaacatcttattttcatccgatttgtaaaccatcctctattataacactcctactttgggctatgcataagtactcactggatagtagttaatccctcaaatcctaatctttttaaatcaatagggaaacacgggagactttttcttaattacttgaacaatttcttgcaaatactctcctctaggtcgctgaagcttgaagcaagaacaagagtaaggtagaacatcacattccatcttgtgtgtgtgtgttccacttcctatttgactatggctactattgccaatgctgacagaagaaaaattttcaccatctaacgaatattaccatggaagaacatgtctaattcagtcataaagattaaagtttaaggcgggagagatggttcagtggttaagagcactgattttcagcgcccacatggtggctcataaccatctgtattgcgagtctgaaaggatccaataccttctttaaacctccatgggcaccagacacccatgtggagcatatgaatatgtagggttaggcaaaacaccgatacgcataaaataaataaatcgtagaaaatttttctttagagaataaagtttagccagttgaggtactgcatacctttaatctccgcatttgcagcagagacaggcagatctctgtgattgtgaagccagcctggtgcaagttctacaccagccagttaaatggtatagtggtttgcatgaaaatggttcccagagactcacatttttaaatgcttggttcccagttgctggacctgtttgggaaggactgagaggtgcgggcttgttggacgatatgtgtcactagggaagggctctgaggtctcaaaagactcctgcactattcccagttcgctctctctacctccaatttccacagtgagatataagctctcagctgttcctgccaccatgaggttcctcaaattaaatgctttcttgtataagttgcattggtcagggtattttattacatagtgagaacctgcccaaaacaaaaaaacagtgaagtttagcagtaactgtctgtagactatcactttcaactccatgtgacactaatgatacctcgcatcataagttaatatttaccttaaattgaaagtctttgttctaaggttcactgtcaactgctcaactgcaacgctattgtgttccacaaaaatgaatagtctgaataaatactatgtggtctagatttttttctacatgataaaatttatcagtaagtcatggtgggatacatacttaagcatgacactcaggagatggaggcaagtagatctctgtgagttggagccagtctggcttacatagagttccagatcagttactgttacatagtgagaacctgtctccaaatatacatacttacatacacacatatatacgtgattatcagaaaccatatccagatcttcgcaaaaatttaaattaatatttaattatatattttcctatgcactgcaggaaaacaaatttttagtgtagtgacaacacagataacttgtcacttgactgtatagccaaagaaagaattgtctgagtaaatacctcagtgagtaaagtacttgccatacaaacatgaggaactaagtttagagccctaataaccatgtaaatccaagcatagaagtgcaggcctataataccagtgctgggggtggggttgacaggtggatccctggagcttgctggccagtcaggctagatgacacagtaaactccagattaagtaacagaccctgtctcaaacaaataggatggactgcaatagaaggtgcatgacatggaactctgacttacacacacacacacacacacacacacacacacacacacgtgagcacactcacacacacaggtgagcctactcacacacatccaaactatcacacagaaacagaaacagaaggacagagaaaaagtagtattttccttgataagtcaataaccacaacaaaataattaaattaagaatatataattttaatacttaaatacatacaaatatatgcacatatacacagagagaaagacagcaagacagagagagaaatttacctacagaagatggcatttggagaacatttttgtcccatttcctaacaagttccaaatgattttacctagttgttcttctgtcttctatgttaaagtcttcaagcaaacaaacttaccaagccacaacataattattcatcaaatggcaaagagaacattcatcaagtttattggtttatcgattgatcagctcactcattcatacatataataaaatttcagaaatacttgcgaaaatgccacacactgtgtcagatattggagacaaaacactgagctgagaaaatgaaagatggggcatgctttaagagagcctataacaaaaaaaaagaaagagagagaccctatcaactagtggaagaatagatattaaagagttatacacagagccaatgaagtggtgtataccatgtatacctcagcattcagggggctgagacatgaagatcaagacaagttcagtaccaacctggactacacagggtgtctaagccagcaaaggctacatagtaagaccatatctaatacctcacctccctctaaaatagaataacacacaataacttgtaataactatgaaggaaatatatagtaatagaaagtgttaaactgagaacttaaatactttttttaatttttaactttctttttatatgcagaactcttgcctacatatatgtgtatataccatgtgcatgcctggtgcctgtggaagtcagaagagaatgtaggatcccctctgactggagttacagatgggttgtgagccactatgttggtgctaggaactgaatctgggtccctctgaaggaacagtgaatattcttaataactgaggcatctctccagataataatgattggaaattacatatgaaaaagaaatactagacgcagagcatacacaatccttgatacagccacctcgaaaggtattttagtaaatccctacaaaactcaaatacactcataggatgatccagcaactgcagtcctctacccaatttagctaaaactgaagtaggttcctggactgcaacaaagtccccacactggcataggatgctcataggaaggaaggctgtgtaccctgtgaaggctgaagttatgtaccaactccttgcgctttgattttgctacaaacctaaaattgctgttctaaaaaaagtcttttaaaaaataaacagaacctttaaggtcagaatttaagttagacactgctacaaaaaccagtgattgcaaatgctgagaatgcgtgtccatcaaggtaaaggaacagtgtttaaactgaagaataattacacggagtatggacaagttcaggcttttgattactccaggtcgacccttactatctcttctcacacgcaaaaagtccgaaatacatacgaatctttgccctgggtacacaattgcttgtgtaaacttgtaaatatgcacacccacagatacacacgacatacacatatacacgcatgcctaccattctcatacaggctagccagaccagggtggtcagcataaggagatggggaaacactgcaaaatcaggactcctcccttttttccttttggtaaatacagaagaaggatagagtgcaaaggggcaattataaaatatctaggtggactcacatttatcttcattgtctcaaataaagtacacattacacaaacaaagatcgaagatctcttacacagaaactaaaaatagtaataattgtattgtgatggtaagaacaggaaggaagggtggtgagggagattaatcctcttctatcagagaaggaagtcaatagacaatatctaaaacagataaaggaagacacgatggcatataggcataatatttgtagatatgaaggaaactactagaataaaagtgttaaaagtctacaggaaggtcaccattagcaaacacatataagaagggatggggcatgagttagcactttttgtcacaaggccttctgtgctgtaactataattatgtacacagaatgataaaataaagatgttttaaagagaaaaaaggatgtattaataaaactagcagaggtgtgtatatatatatatatgctcatctgatttgctcagctagcttttgagagatggtattcaccaccttcattgggctggtctttttctatcatctggagaaaaaacatgcctcataaacatacccacaggcaatccaataaagccaattccttaattgtggttacctcttcccaaatgtgtcaacttgacaagcaaacttagccatcatgaattgtatatgaaattcacaaaaataaaataaaacagcaacaaagtgaattaaacatcagataaatcatgttgaagatacagtgggctgaggaagccaaaggaaacacaattaagaaacaggcagatctcggtgagtttgaggccactctggtctacaaagtgagttccaggacagccaaggctattacacagagaaaccctacctggaaaaagaaaagaaaaaaagccaacctcgattagatgcatgaacagaaaatgtgtcactgagtagattattctacataaaaactgtctcgatatagatgttttaattttattttacgttttatgcatattgatattttcctgcatttatgtccatataccacaaaaggtgatttttaaaataaccaagttctttcctcataattaagagttaagcgactacacagagatgaagagtttggaaagaagaaatggccatgtaactggggacaatgaagaagtagcaagttgttggagtgggagtcacagcaagaggagcagcctctaaacagagagcaccatgatacgaaagaagagttagagaagcacaaagataaaccgactgatttgaaaatatagattagggtcagcccagaatctagcagaaagaaagggactttttctttgttcctataccatatggcacacgtctgcttccacagatcaggctgatgctattaataaagcagctaatctgcaatgtagattaagtaggattcgaaaagggggtgctgctaccctgggaaagcaacctccattcagaacatgttcccaaagaaacaatttcttgcagataaaaacagaaacaaaaaaaaagtctggcaaacacttcttacaatacagcatgctcccagagtctgcagattaaagaatacacacagagcagcatttgaaatgcagaaaagataaagggaaagannnnnnnnnnnnnnnnnnnnnnnnnnnnnnnnnnnnnnnnnnnntaaatcactgtgtcatcatggtgtcctactgcaattgccaatctttgctaatctataacccctttggagggaaattgcaaacacctccacacagggactctgtatgtatctctgccctagttagcttaaggtagaggacacactgttttctgtctattcttgccagctacaattgagtagatatttttctttctcctgcttgcattaaaaaagacagtagaggttttttagcacactttttcaattcatacatatcttcaggagattctcatatactccatccaggaatcaacttctccaacgcagaagagcatccaccctccacagcaagcaacatctcagtaccgagcagtgatgtctcacagccacctactgtcctgtgtctttcatcaacttcacctcccaacattataccgtgcctgtttgtagggagaagaaaaagccttgcatgagccaagtgttgaagggtgtgtgctgttgacacagacacagccatgggccataccaaggaacccacagcctcagacctatgggaatggcaaagcctctccaacccctggggtgaggcccagagggctggcaaagccttaccgtggtccatgtatagatattgatagtgtgagcagaaagtgtccaccacagctttctcccctcagatatttataatctgaaatctgctcccctacagagactactcccactgagattagctaaacttgtcatccttgatttagttgtgtgtcataaaccctggccccttgcttaactgtatgtagtaactccacctccttgtccggctgtgtgcaataagccctcttctctcttcaactgcatgtaataaacacactgagcttccaggatgctgtggtttttccatcagagagaccaaaccacctacccgggctttcctgtgtgtctgtgttatctgtcttcattctcttgctgccctagtcaggtctgtccctggagctgtgcaggacatggcactgttcttcagactcccatccagttcctaccccaaactcagtcaatcactaacactgttcattcccaaatactcttctttttccccctcaagaggctcagtgcccagcatcggaggctcatttctctaggactctaacttctcttatatttccaaccacctatctcacctctttgcaaacatttctcctcactatttgaaatatatggatcctgcagctgaagacctgaatgcataaaaattctgagtatgtatgatgtgggtcagctgtagagaaataagtatcagttaactgacttaggctgacatgcaggttagggggtggggagagtgttaaacactagagcacatgcccccctcacagatttcatttgtatggagtggattactacaacccaggaagaaacatggagccattactgtaaacatgttctgatgactcaagagaaccgagaaatttggtttgtacgtgaactcccaattcttaaagattgcaaaactttaaagtcaacactgaaagtcaaacaaaccaaatctgtgagctagaaatgacttgcaggactaccattttgcaaaccgtctaagacatcagtggatgtcgcactgtatagtacagaatcacctaggcagattattaatgcagattcttgggggcccgcactactgaattctggttcattagattcatgctgctctagaatctacattttttagctagctttcctggtgactttgaagcaaaatggttcaatgactgttaacaaatctgcataaagagaaatctagatgaaaaggtatgaggacattaaaggaaatgggaactatatttctaatgccttcaaaatactttcattgttctcatccaacatatgcctagggaaatacaacttaatattaaacttgtttcaactctaaacagcagtgttcattcataaacacatcttcaagaaatatatgaacccaattagtactatttaaaaatggctttgttcaatgtactggacattagaaaacaacagtgtagtgataattagcactgaaatttaagatagtgttctacaaatcaattgtattttgtttattaacttattgtgtcctggtagcaaatacttccttaaaatgaaacagacccatgtcttaaacttttatttaagcccgatatatgtggaagttctgaacctgtacatactaaaatccatggtttcctgaatgctaaagtgttttttttttttttttgcaattctaaatgaatatttgccccttggcaagtgtgagagtctcacacatgaacacacacacacacacacacacataaaggaacaggaagacgttcttagtgactcagttcctagcctattttgtcccatattattaacccttcctgtgtataaatcccagccattcataagtcacttactaagtgctgacgcatacttttattctgtctactaacgtcaatttcttcctaacaaataccagtgtttcattcctaactttaaaagctcaagatagcatttggaaactgatagatattatatactatcgtgctatctatgggaaaagtgtacgatcctagtaagcaaaataggagaagaggttaacacaggaaatgctcctgactgacagttgtaactctgtggtatgaagtcatatggtcctgactgggagagacattcctaagaagcatagtattcatggcaccacatatggctgtccctgagaaagaaacaaaacagaaaccactctgagtcattattgagcttccaattcccaaggcaacatcagtaagaagagggggaagaacaggccagacagtatttttggctcaacataccaggggagcccctccacaagggcctttcatatggctatgtattttatgtatttataactcaggaagttcctgtcctcttcgtttacagtaatatgctttgtgcctgggaagcttagaagagatttagcaagaatcacatttctcacatgagaaagctgtcaggcacaaagtgagtcctgtatcaaggactgcaacacttgctttcagctagactgaaacaccaaacaaccattcatcccattaaaatgaaaaataaaagagtttccttttaaggaaacaccagataaacctcaaaagcctacatttacgcacatataaacacacatacacacttcagtcgaatgttccaagcaactgaacaatagccaccacaactatagtatgactcatgtttcaagtaggtttgtataagaactagacataagcacatatttgcttgataacgcagatatatacaattgtggaccaatttctattcacctggtcttatctcaaattcatatgtgaatcgaattactaattatctcatcataaaagttgtagtaataaaactaagccgacaatgtatcttagtaaaaaactaacctattgaagtaaactaccttaatagggatttagtgcagggcagtgctaagattgctttgccataactgtttccaaattagcttattttgtggtaggtggtccacacatgacaatagaagtactttagtgaagctagattttacccagttacatatgtcacaaatcttgtgcttctcttggaatatttcaaagacaggctataatccagccaaaacattacatatttggtttgacagcacaaatcctgtgatgtaagttaggtgacctttaagccagtacctgtttgtaggagagaaataacaagagcttgacttaggacaatgcaaacttgagaggaacagatctacagaggagcgaggtgggagaaagggccaattaagttgctacaaaactaagtcatcaaaatgcatgctatttatggtgtgtctttaatttcacaggttcaaatctgtcaaattaaaacattccaatgggtatcaaaattaatggacactctatatttacactgcaaacaaggcaattaccacaaagttttaacaagagtttagacttcatgatatttccaattaccaaaactcgagtaaggtctgattataagctccaatcagcttcaattacactgtcctactccccctactcacttgctcaaatgctatgcaggttacaggaagaagtgcaaagtgtttgcgtgagcatctgatgctcactgtggttgagccacaatccccccatcttgataaacagctactctcatacacatatcccagcctccctgaaatcctgcatctttgctcaaacatgtcctcattcttagcgcccttgcaattttgccttgtatgctgaaagtttttcctgaagattcagatggaaataatgtcccctctggtgtaatggtattagaaagtttctggggcctttgaatgacagtaaggattggacaagagatcactgagctctcagccatgtgagagtaccacaagaaagtaacagtgtgtaacccacaagaggaccctcaacagaacctatccatgacatcctgatcctcgatttccagcctccagagctgtataaactaaattctgttgtgcgtaagccatccactctacaatgccttcctatttgtaagcccatgctgactatgacacacatactgttctcgctgaaggaaatgcttttcctcgctctactacttgttaaaaaacaatctccatactttttaagaagctttttatccatatcttcccagaaagccctccatgctattttccatttaaagtgaaactcatctgtgttcccaaacacctttacccctgcatctgcactgaaccacaatccatcctgtaccatgtgtttagaacaccatattctccaattctgtgtacatagcagccagaaattgcttatcttagccctaataatgcttacttatcttaatgctgaggtgggctcctataaaacatttatgacatttgattaattattgaacaagaagaatttcaaaggtagaattcttccaactgagcagcttgcctaagcaagttgtcagtagtaaaaataaccaggcatatctacaaattgaatgtttggggaaaaggcccagaaaatctgaccacactattcttcgtgctccgggacccagatcaaacataccatctgaagaggctctccagtctctattgggcacactatgtggcactgcaaacagcacactactcatcatacctatttattatttacattacgactttacagtcacctctctcttttctcaataggccacaagtttctcaagagtaagacctgtttgtaactgtacttaggccctcagcctgaggcctcatacatagcaaggagatgatgtccatggaatgactatacattgtagcatgcatttataatgagcaccatggttagtaagactgtgtgggctgcaaaatgaaattgtaggttgaaagcaaagaaagtgatcatgtcatctgtaagcaggtaaaatcagtttaatgattacatgaagaaatggatggaaaatacttagactccacaagaaaagaataaatgtgcaagaggagaggttattgcaaatacgtgggatgatgcagtacatggcttaattaaatgaaggaaaaacagaaaaggatgataattagagttaggtgcctaatattatcctcaaatacaaaatagcctcagttctggtgagctgagcacaaagttgaaagtgactttcaatggtcaaatagggaagttaaccttgattaaactggaacagaatcataaaggtcagtcggtaactactaacaaagaaatactgtcggctgataagtgtggcaagggtaaacctcaacttcagagggtaaacttgacaaataccacatgaggggacagttgggtttgatgtttcttgcagagtagaatattaaaatgaacactgtcataaagtattttcccttttaatccgtgtgcagtcgaaccaaaccacagcccttggcttgccatggcacagtctccaacagagatgtggacggcaactgaagtctggcatcagctccaggcaggtgttatttggggaggcattctgtttccttaattggtgtggagagatgaccaacagggaaaatctgtgagacgagagaaaggactaggactttggaatttaacaagtggagaagcagaaggtaccagagaagccaatgtcacagagtagaaaatacacacagatcaccaggtgtggtcgcacccacaattaatcccagcacttgggctgaagcaggaagattgtgagctcaaaggaagcctgagcaacatggcaagaccacatcccaattcaataattaaaagccatatagatgaagcattaagtatgtgcagcatcaagagctggcaagggctcaagcaataagcaaaatgaaaatcaccttttaaaccccgtaggaagagaatacacattttccttagttgtcagaaatgtgataagtgataagaagtacaattcataacacaaagctggtaatagtccagtccagcaggcttggattagcaggaaggaagaagataagaatacaagttgtgagggccaatgatatgactggtacttccttgaaaacatggatgccctgaccctatctcaatacagggcagaggacaaatggcaaaaggagactatctagctaccaacaggagtttttccacactaaataaagaaaaagtcagatctaaagcaaggtcttccagcccttcaatctgtctcaaccttgacatttggggctgagtacctctttgtgtagaggacatgtcctatgcactgtaggatacaaaggatcttcacagctgctacacactgtatactagcagcactgtctcccaactctaaactctaaaaatgtctccagaaattattaaatgcttcctgggaattaaaactggcacacctagagaaccgctggtcgaaaggcgtgtgtgtgtgtgtgtgtgtgtgtgtgtgtgtgtgtgtgtgtaaaacttttggagacagaggagttctatgccctttcttatgtgcttgtccttaacacaggttaaagctttctggatttgaagtcaaaaataaaaggagaatatgagcaaccagaactaacatggtgaggtggtttgaattggattccatgccccaaccctgccacacacctggtctccagcatttgaacacttacttggtgcactatttatgggagtttgagcactatgttgctgtggaatattattttagcaaggtgagggtgtgctatatttgtttatgctgcagaataatgctgtaagtgtgtaaggatgtgtcacttttgttcatgctgcatttgtttcaccttgcccacttaaggcacctaatttgtctaagggagagctgaatggcaataactaggcagagaatgactaggtggggctgccaggcatagagaataaatatgagaagaaatccaggctaaaaatgaacaagagaagaggggagagaatgaggggaacacaaccagggcaagaagccaggttaaaagccacaaggcaaaaaggcagagcaagaaaaacagtttactttaagttaaaagagctagccagagtctaaattaggccgatcatttgggcttatggtcgtagcttggcacagtatgactttgatgggacaagtatgtcactgaggatggtcttagaaagttaaaacctcaggcctcttctagcttgctctctctacttcctgcttacattggaaggtgtgagctcccagcttcctgcttcaaacagactacatgcatgctgcttgatgccatgtcttcatgccatgatggactcttatcttcctacgaccataagcccaaataaactgtattctagaaggtgccttgacagtggtattttatcacagcaatggaaaagtaactgtgtacatggattttgagggatggaaaaacttgaaaactaaaaacaataaaattcttcatctgcttaattactagccctctcatcatgtctatccttctctctcaagcatggtaaaaagttcaatgaaaagaaccaacatggaaattttagctcactaacattagtaagtgtcaaattaccatagggtatcccataaaaatgcataaacattatgtctcattaatttctaatagtgatcataagtgtgaaatagcttgactgcaggctccaggcatacagtgaactattcatgatcgaatttacctattatagttttttttaaattaaaggcactctttttctttttggagggatgatgcttaaagctgaaagaagtagagcccaaactacattaggcactcgcaattatttggcttttaagcccacgactaaggcctcttactaggcacacaccaacgctaaaatagtttgtcacaacactttctggaaactaattaaaaaaagattgcatttggctgcctgtaccacacttttatagcagccaatctttaggcaaagcagacacaggaagcagcaggagaaggtaggtggttcttggcacttccctaatcaagaaacaatgcatatcgtgtacttgtgtaataggagccagcattagttttccaaggcagttttgcctcacagaaaagttcacaaacaaacagagaatggggaggggaaagaagagtgaagaatgcaatgggccttgccatgtattctgttagaaagcactcaagtataaatggggagaaagaaagagaatgtatcaccatcaatggcagtgctaaagcacagcaagccttgaggtgactcagaaattatgtaataaaggtcaaactaccaagactgctatttttaagaactgtgctcgtgtagccttaaaatccacagtcatatcccttctgtgcccatggcacttttgcaaatggtcacatatcttccccactatttcatggcagcaattcaaagaattttaacttgggattttcagtaacattgaaacaaatggcccctgaactctgtcttctaaattatacataaacatggtgcaaatgtgggccaggtcccaaacatcaccagtccacggtactgcaaggtcttctggttaatttagagcaacccggaggtttaggctcttaggcagtatagaaaaatgatgggttaaaacatagatttttataatcacattgggcctaaatgccaagttcactgttgcagagtctcaggcaagttactgagctgctctgagcctttcttgttccctacaaaccgatgtctgtcagggtgaaatgtgttaatattcagagggagacaatccgccatcaatcctagaccatccttgtacattacaggtctgtgtgtcaagactgaaaggtgctgctgggattttatacaggctatttcccagggctttgtttgtaagaagtggttttcagaatgaggtaacatctcccaatcccagcaaagagcaggctgtgtgcttgtcactattaaagtgacaaatccctcaagtgttcctctgctatagtacaactcacttcctgtacccatcatccaaatctaccctatgggacttaagattaaggtgaacccgagtattgtgttgacatgttgctattactttttcagtgatagtattctttgtctctgatcaagaagtcttaggtattcgtcaatgatctgtgaaattggaacactgggtacacagtataaaatctcacactttgtataattcttaaagatttatttttaactataagcatgggggtggcacgtgcacatgagtccaagtgctcaaacaggcactggatttctggagttacaggccaccagatatggatgctaggcatgaaacttgggtcctcttgggtcctctgcaagggcactggtccaaactgataaaccattccccaagccttctttgtatggctcttcacaaatagatgcaacaaacccagaaacataacaagaggcatgatgttgactatcactgaattatctctcaatagcctgagcatttatttggttaatgaactacagaaatgtctcaatgcctagaatgacctagaactaagctaacactctctaaagggaagtatactgataaaagagtgttgctatagccttcactagatagaataagtcagattctagaaacaaaactataaagatgagatattcagtttttaatattcagcctaaacagtgatctttcataattcccactttcaatgtaactaaaatctagatataatgcatttgtgttaaggcagattcattaaagttcttaataatctttgatccttaatatgtagaatctgaacgaagcccattcagatcatttatttctacccctttgttgtacagagaaaaaaactgacagcaaaaactatagaaaaaatgatatgaccataaatacattttaaagttaattcatgtcttagaaatctcctcaaatagtcagaaacaagctttttaaacaataagatgacacacatatcctacttagctcagttcaactcttactagcataggaagtacttttaactactataaaatatagttcgaggtcttgaaaacttgtactgtatgttaagacaaaaatggagtttccactagttcatggcaacatggctggtaatgggcatgaatgagaaatgctattacagaaatatctgagacattcaacaagtgatttaacattcaatgacaattcttctacattgatagtcttcaaaaaactaataaacatgacaaggaatatgatcttcgggattagtaacattcaagtaataacattattttaaaggacggagggagttaaaagccaggatctgcaatgtaatacaataatataactcgatccataattagctatagcagaactggaaggacaagtgtggaaacctggcttacagccctgtgcaatcactactttcagttacaactaaaccctcatttcatttgatatagagacacagctacttagaatttaggatgtagtctcaggccaactcagcttatataaaaatgaatggtttagatctcacaagagcatctgaaaacagtttgatagagcaactttaggctgtactgaagagtcaagaatttagagatcacagaacataggtacactctgttttagtaacacaaatacacaaataatctgagctgcccaacatggataaaatccagacttttttttttcttggcctactaaacttattcttccatttaaagaccattagttattcaaccaaagggggagaaatgtaaactactgcagtgccaatgacaaacaatctgtgagtgcaacctaagaaaggttattttcatgctaaatgttttatatacacagggactcttctgaaaaacattgatttcataatgaaaggtaccagactgcatagcatattataagaagctctgtctctgccaatcccatcttaacattctgtatgttctcgccttgtatcataggtgatgtaaatgaatatacatgcaagttacattacaaacttcaaaaaagtacagtcttatccatacaatccatgactatctaaagctctctgaaaaaaaataatgtcaagaaaatcactgcgaggagtagagaaagagcagagccttgctgaaccccaaggacacagtcatccatctatgaggatttcagaattcaaaaccaaaagcagtcgggtacattatattacatagatatacacataatatgcttattacaaatgaatgacaactgaaatatacctattctagaagactggagaggtggctcagccgttaagacagcttactagtcttccagaggacccaagtttggctcttagcaccacacctggcagctcacaagtacctataaatccatctccagggatccaatatactcatgcacatacaaacaaacaaatatgcataattacatataaagaataatttaaaaaaacacctactctatatgagatattcaaccattccctgtgcttgctgaatttccttgcaagtataaaaatgaaatcaatttggttttaaatcatcacccaacccacatgagatgtctgtatgaaacagaaaaatactccaggaagacagagccttatgtctggcatatgttggcaaatagtgtgatctccatggtctgataccattgtgtagggcccaaccctacataatgacaccactctattataccatacatgttattaaaggccaagatataaaagcacagtgccttgctatctacagatagaaccttcctaaatagctcgggcaagcttaatatgctattaaacatttcagattttaccagtgattaatttcaaagcacataaaacaacacatccagaactttccttcccttaagcaaaacaaacggagacaaagccagctatctaaggagccccaacaattatcactcatttatgtgtttagaggacaatcacccacttgactcagtcagtaactgctcagtcaagaaggagacatagattacaagaatgaagttatttaaaagttcatgaagttagagaaattatacacccaattgcctctcagctctgtaatagcaccaagctggtatctacagagtactggttatacaatttcttaaaacagtctttggagaatccattttcccaagttgatccactccacccatccacagcacaatcacctcattaatataacctggtttaaaacaatgataattctgagtttctggcaaagattcactggcctggtcaactagatgcacacttagagtatgtcaatgtgactaattaacaaagaaagttatctaaggtgacaaattggcaattatttggtaataaaagtacagttagcaaactggggggtgttggtgcacacacctttattcccagcactcgggaggcagaagcaggcagatctctgtgagtttaagggcagctgagtgagttccatgacagccagggctacacagaggaaccctgtctaaaaaaacaaaaaaaaaatggaagtagtaatctaaacatgttattgtgtgtgcatgttgtcaaataattttatgcatcttttatatgtatagaattcaagaatattttcccatttgcccagctatctatagcacttctggcaaaaaaattcttccacataaactccacttcacaatcacaaaatgaaaaaaagtgaagtcagaagtctaaatttaatctattttctatggtacagagtagctattccagtctacttacacttgtacagataactctcatagttaattttacagaattatagacaaaggtgaacctatttatgtagagtaactttgaagaagtttttaacattatttaaaggtatatttatctaaggagtttggtgctatatacattaattatgaatacattagattaagaatcaaattaattttgaggtaattgaggatacttgattatgggtttcaacactagacaacaccaagcattgtattactattttaaagatgggacagtggcatagtgattgtttttaagaactcagcaattttagagatgcagactgaagtctgtaggagttaaatgaaaagatatctggagtgtgaattaaaatcctctagcaaagaaaaaacaaaggaccgatagagtaaatttagaaattctagagaaccaactgctctgtctgagtaataaataaatggtaggtcaccatattacatcctctttttagtagttttgctatgttttaaaatatttcaacttagttttacttttctcttaagaccaacaaattaggtgtacaattaaaattcctcaaaatgttgaatttatcaaaacatatggctatctttaaacaactatcacagcacaaccaataactttaaaaaatgattgtgggctgaggcagtagctcaggtgataatagtgtttgcctccctttcatgaattaattcataggcttaattcctattgtctcgtaaattgtgtattattggcacatgttggtagttccagcaatcaggaggcagaggcaggaggttgagaagtccagaggtaccctcaactacacagaaagtttgaggccagcttgggctatatgatattctgtctcaaaaataaaggactgtaatcaaatcctcccatcctttaggcaagcatcacaattactagtaattgagtcaatggctattgtgagtaatttcttcctaatgctgtgtttgacttgcacctagcttgtatgaatcaattagaagcttctcacttatgagaagcaccactttatagagaccaaatgatagaaatgggaagccaatttactcaaggttttggtagcaatggagcaccctcttcccagagcaattcagtaaaaatcttcactaaatcaaagacagtgcaaatggtaatgagttaaaaattgtgttttctgcattatttcccccaaaatggcaccaatgtcttcttccctaggccacccctttcaaagcaagtattgagattcagttaaggttctgtttaaaactatggtcaaagtatatcatttgaaggtaaatcagattcagcctgatggggtaataagttttaacttggagagaatatatttcttcctatcctgaggttcacaataaataaccatgtgaaaatacatatcaacatatacatgcaccaattgtgagctgtcttccacaatgggtttccctcatatgaggccaagttaggctgaaagattacaactatgttattatgtcatgtaaccttttctgtcttcaggaaaaaaataatatgacatacttctcaaatctggcagaaggaatgagagaaatctggatcttcaataataaccatttcaatgctaaggctaccaggtaatatattaaccagatgtgctgattcatataaattagcatacattactatatactttttcagagcatactggtatttacagtgttttttaagaacaggttagaaatgagtaagatttcacttacatgacatactgctactggcaaagttcttagtacttacagtgaaatctaaggaggattataattataaattgttcaaaaaggaacaaaagaagtgagagactgaataactttttacttttaagagtccctgaagcataatgactcagtgctatagataacttctacaatagaggtgatagcttttaaacttatctctaagtcagtccccatagcacctgaatgactcagtttccttatttgcacaagatcactaagctccctgacaagacagtatgtcatacattcctactgaatttaaaaaatattcaaatgcctgaaattgatcagttcaaagaaaacagtagacattttctttaaaaattcagagtgtgggatagagagatcactcagtggttggaagcgcttattgcccttgcaaggacctcagtttgtttcccagcacccacatggtggtttcaaaacactaagaaattccagttccaggggacttgatacgaccttctgacctgtacacacaccaggcacatatgtggtgcacacacatatatgcaagctaaaacactcatacacataatataaaataaatgaacctaaaatttaaaaaatgagtgaataaaagttccagtcacatctacagtcactcagaagaaaggatgattagtaaatggacaggatgtgcaatgctgcaaaaacaaagggaactggagaggagagcaaggattgagcccaggtcctcatgaaagcaaggcaagcactctaccgtggcgctatgccccagttccataaccacatttgattcgggtgatataaggggctaacagtaatatatattgctataactttatagaatttcctaaatgtgttcttaatgtttactgtattttatctaagccatgttgtctggcaaatcagacacacaagatggcatgcttttgtagttccagctactaaggggattgtgacaagagaatcacctgagaggtcgggagttaaaagatagcccgggcaacagaattgcaagaccctgtctcaaaaatcaaacaagcattttaggcaagaaaccatatctctgtagggcagacattaatcaaagtgctgaaatttctggtattaatgctcaccagagaacacaagcaaataaaagacagaaaagacaatggaacccagaatttttgactctacaatctgtatcatttttagcttgttgtgaagcctcctagtaacaacagcaaactgttacttggtactttgtaatatcagtactatctctctgcatgggagctccagctctgacatcagaagaatctaaacaaacaaggggaggagggagtttctcatgaccctgaagaagttgtttgaaattctaactcagagaaaagacagaggaaccaggaatggaggctcagaccataatccatgcatttgggatatggaggaagacaggatccagtattggccagctcaggagctacttagtgaattcaagatcagacaaggctctaaaaaaaggactaagaagaaacagaagaatggacgggaaagttcatttgataacatacacatgtacatacaaacaaaaaaatagcacataaaagataacagttaggggcttgggatattgatcaatttatagagtgcttgcctagcacataggaagtcctgggttgagtcctcagccttggcaccacataaaccagatacagcatgcaagcatgtaatctcagcagctgaagtaaaggcagaagaataagaagttcaagatcatcctaagctatataagggttcaaggccagcctggaataaatgaaacctcatctcaaaaagaaaaacaaagaaccaccacttttcttttttgtttttgtttggtttattgttgttattgtctcttttcaacgatgtaactcccaatatatctgattatagagaaaaaaatccctagttaataattgatggctgatttataagaataaacaaaaaagaggagccatgtcgtgaagcacttgaaaatctctgtaaagcaaaatcagtatataacactgaaacttatggcagccaaatgttcagaaggcagaaccccttcctcaccaagatgaaacaaccagtgaaggcttaaaggaagaaagagagcacagaggtagcggctaggctataaaagcactgcaattcattacagacaaatgagaaaaatgcttccaatttggtgagactatccagggtggtgtcgggagcgagatgaaatggggattacaggaataaagagattccgatgcagggcatacatgagcagcaactagaatccaggactctaaatggcaaactccaccacacgactctgctcctcctcacggaccttctgcctccactccagcatccctttccaggaatttttccacaggtctaaatttctttctgaaagacatacctaaccagggaaccttagcattttaatctccccaacaacttagtcggacctttagaaaaaaagtcgaaactccaacatgagacacaaaaatctactgtgacctagagcccatcccgttgtggccagatccacaaataaatataacttctttttgtttctgctgggtcttttttttttttttttttttgtatctagttgaacattctttatcagcatatttcgtcatctctctacctttgtatatgctgccatttttttttatctagaatgcctttctccccttcttaaatcaaagctgtgttcaagccttggtgcacatgtgtactactataagccggtctcttttttaacttttcagttattctctgtggctttcacatcatgaatcttgatcccattcatctccccctcccttcatttctgccctctgtccttgcgagctccacccaaaaatataataaaatttaagaaaaaaaaactcattgtggaagctgcagtgtggcccagtgagtcattcagtaaacccatatatctttacttgcaagtgttcattgcaatgagtcactggtctggttccaggcctctggtttggcttctgctgcattatctatactgggccctcactgggactcctcttggatatcctgttgttgccctgtatcaggaagatcttagatcctgtaggtttggatccataggtccagccccttcacatcctccaacagatcatagatagggtggatgttggggtgggccaactcatagccctggttctgggcctgggtagttgcatggttggtcagccccccacctcacccccatcctcaccacccagggtgagctctacatcaataccccagaggcagcactcaggaaagcaggtgctgcaccttaatacataaagagatagttttaaaaatccaatttggtgggggcagtggtggcatacacctttaatcccagcacttgggaggcagaggcaagcaaatctctgagttatagtccagcctggtttacagtacaagttccaggacagccagggatacacacagagaaactctgtctagaaaaaccttaaaaaaatccaaatccaatttgactgaaatgcccctctgtaacatttttatagcacccccatataattaactcccttcctcccttctctgcttcgcttgactaggagtattatttgaagaggaggtctcaccctatagcccaggctggcctcaaatgtaagatgttcctacttcaagaatgctggatatacagatatgcaccattatccctagcctgactgtgagcacttcttgtcaccaaacatggaagttatggtgaatacttggtaatcaaagtctgtacataaaaccattaagctcaaagcatcgtattgaaaatcaaaacgtagttcaattacaaaaaaatagccaatactcagttctcagttatacagtaaccagaatattagtgtgctagtatagtaaacttttagttaacagttaaacactctaattctggcttcttctacctctcacacctatcagcaaaagttattaacttaatttcactgtctaaagaaagcaacaactattatgatatctccataaatcaggcactagggaaatgtctggacatcaacaaagatgacaccagctaactatctcagcaacagaggagaagctaccttaaatgccctcccctgattatgagattgatgactgacttatatgccttcatccagcagctggtggaagtagaagcagacacccataactaatcaccaatctgaactgggacccagatgcagagaaggaccagtgaagagcatgaggttcagaccaggctggtgaaacacacagaaacagctgacctgaacatccgggaactcttgctccccagtctgatagnnnnnnnnnnnnnnnnnnnnnnnnnnnnnnnnnnnnnnnnnnnnnnnnnnnnnnnnnnnnnnnnnnnnnnnnnnnnnnnnnnnnnnnnnnnnnnnnnnnnnnnnnnnnnnnnnnnnnnnnnnnnnnnnnnnnnnnnnnnnnnnnnnnnnnnnnnnnnnnnnnnnnnnnnnnnnnnnnnnnnnnnnnnnnnnnnnnnnnnnnnnnnnnnnnnnnnnnnnnnnnnnnnnnnnnnnnnnnnnnnnnnnnnnnnnncctcaccatccagggggagcagaaaagatatgtgacaggtaaggttttagttggggggataggggaggacgggtgggagaagggaactgggaaagtcatctaaaacactcctgtttctaattcaaatgaaaaagttgggggaaaaaagcaacaacttcagaaattatacaagaagaaaataaaaatataaaagtttcaactagtgtcagactactctatatccaccatcttgtgatggaagatggaggtcttagatacagtttaaaaatgtcctcctcactctcgctcccttgtcgttcgttcgttcgtgtgtgtgtgtgtgtgtgtgtgtgtgtgtgtgtgtgtgtacatggggttgtacttgtgtacataaaaatccctcagaactgggcttacaggcatcttgtgtttgccggtacaggcatatatttgtagaagccagaagtcaatcttggggtcatttatcagaaggtacttcctttttgagagtctctttcaaaggattatgggccccctttggttaggctaagctggctggcctgtgagctcctaggatcggcctatcttctcctacccccagcactgggataaccaatgagtgccgccagaccaggctttataccagatcactggccatcaaactcagtcctcacatttgcatgcaagtactttaccaactgaactgtctaaccacaacattgcattctctgaatggttaaatcattgctttaaatatgtgagatacaagatagagcttctcccttacacttctctagggcactttctctcctattcagtttaacaaaatacaagccacagttgacatcaaattactaattaatctaatattcatgctggttaatagcatgttacagtctgggcctaaccagaaagttacataaaatccaaaactctaatagcaatatatcatttaaaatgtcttgtgttgttgaaagaactaccttccctgatagacagatggatgtatggatgtatggaaagtggggggggcgctcattatgaagatacctatctgaaaaaaataactgaggtgaaatctgttaaaatttgactcacacaaccttaaacagaaatcattacagttctgaatggagaatgtgaaaaagttctcactgacatcaataagctgaggatataaatgtcactttgtctgaaaagaaatacaccctatattcttgttttttccaaatccatgagcaactaaaagagatgcaattgtatcacaagacatatagttaaaaaaattagactacagtgatccagtaaattttgtaatgtgacagaaacttccattgtggctgaacagtatatagatattgctatctaaactttttattgcatcagggttttcttgcatggctcttccttgtccccaatgctttctcttctccctttatcagagtcctcaatcaccctactgtcaccttttttgctgccttttgaaatgaaacagttcttttttttcctgcaagtcatggatgcttgtaagaaacttaacagaaggcaagaaaccaaaaaaaaaatgaacatactcaaattttttcatatattttgaagagctttgaacccttaacagcacaataacccagacaaacaatttctattgccatacgactgttttgttatcatacaggactcctatacacacactcataattgggaattattatagtgatacataatatagagcattgacattttaaaatctaaagttttctatttgcaaaactttaagttaaaaatctcaggtgaactcattcgaaaagtttaccaaatcatattgtttggtcaaactctttggtcttaaaatgtgccttacatggctgaagagatggctcagaagttaagagcactggctgctctcccagaggacctgagttcaattcccagcaaccacatggtgcctcacaaccatctataatgagatccggtgcccacttctggcctgcaggcaaacatacaggtagaacactgtatacataataaaatcttttttataaaaatgtgccttactgcattcttatagaaatcatgcaaagctcaaaaatatacttgggggaaggaagaaaattcatgtcagtattatgctcagggttccagtatttgagctactgcatcaagctatgttcactatggaacagtgaagttagctgggaaccgaaagtgatgctatctcatggctatctagttaccttgtcaaatcaagtaaaatataaaagatgaaataggacaaacagccaaagagaaggaagaatattaccacagtgttcttattaattgagataaacatttttcctttagtatccttgaaagtggaagattcttactagatgtataaaactactatggaaactattccttaacttctcttttcaattaaactttttactactgatcagagtagtctagactggggcaggtaggggggcgggggaagaaagatcactctcttaccacaaactgactaatttcaaagtcagttcattaaaacttcgactacttggttgcaaatggtggttcacatgctcaagaggccaaagtaggaggatttctgtgagtttaaggtcagcctagcctacataataagttccagaatagccaggactatatagaaagaacctaaaaaacaaaacaaacaaaaaattctaaatacattaaactctagcaatacactcagaactgtttcctcgaattcattatggtgcagatactcattaaaactgtgatagatagtacagacaagttaaaaaaagtgactcagtttctttatttgtaaagaaaggctggaataacagggcacattaagaagtaatttccataactttctcaggtttgtatggaattgatgagattttaaatttgtaagattaacctagcggaagtcctttcccacataatggaagccttcgtatgtcctgatgtttgacccctgtttccccatatgggcagtctgtaataggaaagcaaataggagccaaaagagaagtgtaagtccagaccaaatggctagatgccacaggaaatggtttgagttgcatgacacagtctcactctctcttctattataatcaagttgttgctttacagatgaaatatagacatgcaacatgtggcttgtgcttgggatgtgaactaggaatcttctgctttaaagggctcatgagaggctgcaaagtttatgtgctgaatctgtgctcgtaacccctttctccacatgccactgaaattagaaagtttacaaaaagaggaacccttttaactgatgagctgaagaaaccccagtatttcccaaccgaacaccaggccccatagatttcnnnnnnnnnnnnnnnnnnnnnncaggaaatgaactactacttgtctacactgtcggggctgtcagtcacatcaagggtatagggctgcttttgagcattctcaatcaagtggaaacactgtagcgggatattgggggagcgggcctcccgtaggctccactcccacgctctcctcgaaccacgcgcttccgaagaaatgtttcttgagtgagcacatggtggtgtggaggggggggggaaggcacgcaggcgcctcttccttggatttctggcaaagtcgaaggacctgggaacctatgtcgtgcttgtcttgatttacttagctgcgagttggctccaatgtgtttgaaacggagcggagggaggttcccctgccctggaccccaagtgttaagaggccaaacagcaactgacaagaggtgggagggaaatggaatcccgaaaagaaggttcgcgcccacaagttagacaaacagccctacccagtactctaggacaggacgcggggtgtccccaagtctgggtggggcctttctcctccgcaagctgacacgagagagagccggggtaagtggagaaggggtgctcttccgcgcccacgcagtccccgttccccgagttgcgcggcgagagcgcgtttgcagatgggaggggggcccgggtcccccgcgtgttccacggcatgacgatccggggctcttggctcccccaggctgcctggggttgtgggagcacttaccaatttgggtttgtttttcgtttcttcttcgttgaccgcgcgattccccgcgctccgcttgttgctccggccggattcttcgccaccgcctccacctccgctcccgccgccgccgccgccccgagctgctccatctttctctggccctgtcacctgctgccctggaaccccacgtctcctcaagggcaaaagcccctcggagcgctcgggatgccccgcgtccacagagagggttgcccgccaagcgccgctcccaggcccctgggtctcccctatcccaggaaatcccgacgcaaccacgccggtgccaccactccgctctggggcaagccctgcccctaagcagctgcaatcaccacggccgcctccgccctcagggcggtgtttagggtggaggaaaagtaggtgcctatctctttaagacggcctcaacacacgtgattcatcaaagtgcccgctgtcgctcgcccgggcgggcaaaagcctcttcctactcttggtgctgagcgggccaggctactgagcatgcccggagcggcgactggagcctcacagaggacattctgtggtggttaagcactgatttcacttcctgatagactagcaccaaaaggaagggaactagtctagacggataaaggagagcccattttagagacagggaaactgagtgaggacaattctccggtgcattttactgatgaggccaactgagtctcaactttcactagtgttggtcaatataccttccttagtcagagggccctcagggggtgtgctcttgctacactctgtgggaaggtttaattagtaaggcaactggcaacgtgtaggaaaaccactgggagttctgattaattgccttagacagattgtatagnnnnnnnnnnnnnnnaaagagtgagtgcttctgttgccatgattgcactgtggccaaagaaatagtcattgctttcttcccagtctgttagtggttaaagccactagtgcctcaccaagtaatccttagggtgatattaggctctttaaccaaagcacctctttacactttactattgagctgagttctatcttcgatttcccaagctagtttaggtttagggttattgtgaagagtaaataagatcgtgtatgtcaaagtgttgtttaaaagataagtccctagacaacttctagtgtttttatatagcaccagcaagcagcatacatagtcctcagcccaaacgaggtccctactatttcatcctcagcaactagctttccccactcttttccaaaagagcccttccaaaagcagcatctgaaggaaccaccaaaccatcacagatgtagggcaaagtactggggaagccatttgtaataaagcttaaacaccaagtccgtaaatatgtccataaccctgttaatgaccaagataactttgggcaatggggtcttttggtcttctataattcaatttgaagttagttatgctgaaatgaatttggagccaaatgaatatagtgagcattcattaggatgaatttggtgacgcaagtaacttgaacaacagagtgaaaagattttagatatctcaaaagagctcaaatcccaccatcttctttgcccactgtttctttttaatcatgagggtaagatgtctatgttccagaagtagccatttccccaaggacggcagcaaaggagtgtgtgctctcagatacaatggacaaaagctccaagatacatttgctttcttaaagctcatgcgcaacttggaatttgatgtatattttgactttgactcattgcacacatacataattgaatttatctaaatgtcaccctacctgaaatactgagtaaaaaaaataataataggtgctacagaaacataatgaatgatatggctaacattttcacatactccctctagaagaaatgtgggtatggatcaaagggagatgccaccaagtttaagcattgcttaataatctgttcggcaaacatttttatgccagatggtataaaaagtgacttgtgttggaaggctaaaactgacctaatttctgccctttaggctactgaagaaacaagctaaatgaattgcatcatggagcaaaaataggtgatggggaacctatgtagtatatatgtcagaggcggaagagcaccttcctgaagaagataaggtttgaattaactattaaaagtctacttaaagacattaaataccagcaagctagtactacaaatgtagtttatcgtcatggacttctcagcctactgagaaaagtatttaacaaaaatgtattgacccattgctgtacaaacaagcacagagagcattccacaaaggcaaaggaaccgatgataacatgtgcaaagaccctgtaatttcaacaagcaaacgaaaaacacctaaggtggaggactgttgcaagaggagacacagcaggacataatagtacattgagcaagcagaggcaggcagatctccatgactgtgaggacagcctactctaaataacaagttccaggacagccaaagttacctagtaaaaccttgtcacagaaaaccaaacaaataaaataagaaacaggattgaacattgttatctgaacaattatgaaggctcctacttgtacacatcactgtggttttaaaaagctagggagggaaaggccttgtaatatgaattatttctctatgacatgtatttatggacttgaaactgaattgatacgttttgaatgcaacgttggtttttgctgtcctcaggcaggacgaaactccatttgctaaccaattggccacctataaaagatctataatctctacaaaaagtggaaaagtatgttcctaatgggacttgcatttggctttattgtggttatttcagaccctgtcttaagtctcatcatttgtttttcagcatttttccctatttaatgtgaaaaacaaagtataaagcaaagacacacacagcaaccattttttttctttttgcaggaatcagggtcattggtctctcttggaaactaacacacaaaaaagaaaacagtagcctcaggcaaggatactttgtcccttaactgtgaacctagggcttcagcaaacagctgtcttatggctgatctcatttcacctacattcctttaatttttttccttcttgtgacgcacaaacagacttgtggaggaaaagacgtagtcttttttctggtgccaaaaaaagaagggtggctctccccatcaactagagtatcaaaagtatactttagaccagtctctccctctagtttctcatgtgtatctttcttccgattgaccttaaagtcctccattatcttcatctaaacaatctgccattcatagaaaaattcgaggaaacacaaactagaaaaaaagaacgagaaaataactccaaggtcacagcaaaatatatttatgagtcaacagatgaccaaaagcaaacaagtgtttgctaagcataaattatgtggctaacatcaaactagatgcaacacagagttaaacaagggagagaagaggtgtcatacctcctgctataatgtcatatatatcttcctagagaagctctagatatcctttgttgttttgttttgttctgttttcttttttaaaaaaaaaaaaactatatactatagataacagggcttccagaaaatggtcaaacaagatcacttaaatttgaaacaactttgaagtcagagcattaaccaaaaagatagctatcctaataaaaatactctggagattaaattgtcactggcatttgaatgcagcaaaagtcatcaaggtaatgtctcctccctgttgtttgtccccagtggcattgaattttagtagatccaattatgagaattttaaattgaaaagtagtcaactttttaaatcacatggtaaaaggtcttcccagcttcagtgagtgctcatagctttgccacgacattacatatggttgaaaacttaaaggttgaagccattaaaccagtggatagtcatgcttaagacagcattttatactaaatacttcactttaatgtttttgtatgactaagtctgcttgaatatgtggaagttggcttctgcttacttggaagattaaagtgctaagaaaattcatcaatgaaacaattgggctttcagattattttgacatattctccagttaaataattgctagagtgttgtttgaggtacacagacatttgtaatggagcaaccttctaaatataaaaatctccttcatcactcaatctaaaatctacctgagaaaacaaacaagaaaacaaagggtcaaatgcagtgtggtaatcaaaacacttcagaggtagaggcaaaagattaagagtgcaaagtcacctcattcaggatggtttattctagtttggtccatttgcctgaaaattccatgaagtcatcatttgttacctctgagtagttctccgttatgtagatgtaccacattttctttattcattcttcagttgagaggcatctaggttgtttgcaggttctggcttttaggaacaatgctgctataaactttctttgggacatgaccaagaatggtatcactgggtcttgaggtagattgattcccaattttcttagaaactacaataatgatttccaaaatggctgtataagtttgcactcccaccagcaggggaggaatgtcctcatgactccacatcctctccaacagtgaggtaatccagactcagaaagacaaatatggtacgtattcactcataaatagatattagatgtaaagcaaagattaaccaggctacaatccacagctccagagaagctaggtaacaaggaggaccctaagaggggcatatggatcaccctgggaagggaaattagaggagatctacagggcaagttgggggctgggggataagggggaggagggatgagaacaggagagaacgagatggcctaggtagagagggatacagtataagagcaatgaaagggatatcttttttttccaatttggggaaaacattttttttaattttttatttaaattagaaacaagattgttttacatgtcaatccctgttccctctccctcccctcctcccctgcccccactaacaccctacctacccaataccatttctgctccccaggggaggggggtcttcagagtctgacatatccttcgggatagggcctaggccctccccagtgtgtctaggctgagggagtatccctctatcccaaagttcattcctactctagggataagtactgatctactacaagaggccccatatatttacgaggtctcctcactgacacccacatttatggggtctggatcagtcccatgctgttttcccagtgatcagtctggaggccctcttgttcaggtcagctgtttctgtggttttcaccagcctggtcttgagccctttgctcatcacttctccttctctgcaactggattccagttcagttcagtaattagttgtgggtgtctgcttctacttccaccagctgctggatgaaggctataggatggcatataagttagttgtcaatctcattatcaggggagggcatttaatgtagcctctccactgttgcttagatggttagttgatgtcatccttgtagatctctggacatttcgaaagggatatcttaataggaagatccattatgggcttaggaagaaacctggtgctaggttaactcccaagaatccacaagcaggatcccagctaagactcatagcagtagtagagaggatgcctgtattggcctatccctgtaatcaaattgatgaataccccaactatcatcctagagccctcatccagtaattgatggaaccagacgcagagatccacaaccaagaactaggccgaactctgcgtttccagtcgaagagagggaggagggaacatatgcacaagggaggttaagatcatgatggagaaatctacagacacagctgaaccaagctaatgcaaactcctgaactctagacccacaactgtggagactccagggaaccaaactaggccctctgtatgtaggagacacttgtgaagcttggactaccagagggccccctggcagtcaaccacaatacaaacctggtacatgagctagcttgttggagcccactccccatggtgggatgccatgctcagccttaaagcatgggagaggggctgggccctgccccaagctattgtgctggactatgttgactcctcatgggaataattaactgtgagaaggagtggactgggagtgggctggggggaagtgagggggatgggagtaggctagagggctaggaggaggggtgggtggaagagctgtggttggaatgtaaaatgaaatcaaaaaaattttaaaaagaaactgaaagaaaaaagagtacaaagtcagttactgcaaaaacagcaagtttaagactagtctagggtttgagctaatgttcaaaaaagaatgaatgaatgaataaataaataaatgaacgaagaatgagaaaaggggatacaggagaaaacaagcatttttgctgggtagttatatataatcttgacacaagctagagaatcattttgaaagtggaaacctcaattgagaaaatgttcccactagattgacctgtggtgcattttcttaattagtgtttgttatggaagggcccagctgccaccaccgggttctataagaaagcaggaaggatgaggaaggggcccaaaagcaagtaacagagtctgagacagcccctgccctgcccccactgttcagagtcccacaagaagaccaagctacacaactgtaacatgtatgcagagatcctaggtcagtctcaggcaggttccctggttgtcagttccatctctataatacccttgagtccaggttagttgattctctggtttttcttctgaggtccttggcccctctgggtcctacaatccttcctccctttcttctgcaggattcccagagctctgtaaagtttggctgtgggtctctgcatctgtttccatcagctgctgggtgaagcctctctgatggcaattgggctagacaccaatccttgcccatccttaataggagagggggggtgcaacttggtacactatgattggctgatatacctgggagacttgcctttttctgcagagaaatgaggaggagtggaggggggtgggcagcggggaggttggagggagggggggggaggagaggagggagctggacaaagtcattatttaattctaaaacataaaagaaagcaggccaagcaacctgtggggacctagcaagtaagcagctctcttctatggtctcttcatcaactcctgcctccaggttcctacactgattgcatgatctcttctctatccacctggaatcataagatgaaataaagcctgtcctctccaagttgtttatggtcatgatgtttcatcacagcattagaaacactaagacagacatgaaggcaggacaattatcttcctaactggaagaactgactcaaaagacaacaacgtactagagagaaaggatgagacaaattaggcctcaaagagatgaagttttctaagagagctgcttgcgctgctgaacttggaatcagaaatcagattggaaaaggcaaaacaaagaaaggaagcaaggaaaatacgtcatgtggatcagcctggaaatcttgatggacgatgttcaaaggctgatgaacctatgctggaatcataagaacatgggtgcggaataatactgggaaatgcagtcagcccataaccttttcccagtatgcaaacaaattggagtgtaggacacagtggtattcgctgataaggatctttagcaaggaagttataaaacataaagtgttttaggaggagttttggcaaaggtacttgagacaactttgaaacctgatttttcagaaccatgtttcctttagtagggatttcttttggaaataaatagataaataaataaaactcttcacagatcccgaatacacagcagagcaaagtccagctggctcctttggctagtactccacttagcttctctgccacaccctgaggaaatgaggtgtagcagcactgctcctctctgcctaaagctagatgaagtaagtcctaaggcctggaactcgagcagccccagaggaaatacagaaatgcccccaagactcttttaggaggaacaaaccctacttcaccacacattctatacaggaaataaaggaaaggaatatcagataaataacaattagcaaaatgctaccccaaggaaataaagactacacctaagttgggagatatcatctcaacaagtgccagatgttggcaggcagagtctgaccaaggtacagaagctaaagaaagtaattatggcaggacaggaggacttagaaggtcctggcatcaccaggaagagtttggataaactgctacaccattacagaatgtaactgcaggtaacaagcagccaggcaggcagccagactctggaagtataccagtggatgtctcagcatgaggccagaaaattaaagtctcaaaactttggcaacagacagacagaaatgtgatcaggtagtatgtaacaggagtccagtcacagggattgggattaggaaacaaattaccagtctgttgaggggtctggcaatgcaccacgtaggaaaaaaaatcactgattctaaaggaactagtaaagcagacaaagtctatgaaatgaaggcagacaggaaaataaaacttatctccaaaaccctgtcacatttccggatagctgagataagaattgaacctacagctgtaggaccactagctaagccaccaaactactgaaatcctctctgactagaggggtgatggttcccaatggaggaaaagcttatcaacaagacaaaactacaaacactaatcactactaaggccatttacatggagataaatgttaatagatttgggaatgaaagcaaataatggaaacgactgatccacacaaagttacccagaagacaacagtgccaattttttcttgggggcagggggtgagaagtggatggtgaattcccaaattcttgccccctgtggttttaaacaatatattgaaaacgaagcctttaacttttaacaggaatgaacaggatatatacatataatgctttttaacaaagaacagacctccctgctctacattcaccaaagctccaagatgttttccaggagtctcttaacagatcatgaacggtatccctccaatctatacgttattaaagcacagatgtagggatgaacagagtggggcaagctttctgtttccttgctaatctatgtggctgagagaaacaccacagtattcatgaggatatttactttgggaagtgtagggttttgttgttagtgtttggaactgctgacttgttttcagttgcttttagcttgttttcttttgagaccgagacccactgtggagcagtggtcttgatgttgttatcttgacggagcctccagtgtggtgacattccatatgcacgccaagatgatcagctcaatttagactcccttaagaaattggtaaacagtctcttgaagatgagcatacttactgtaaaagcaggactacaattgtgcaattaaaaactattgtctcttgtgtttggtggtttattttctgacctgtccaaaataattactaagtacataaaaactaaacaacacatgtaaacaataagaatattatttatatctggcaggcaatagctaggccagcctaaaacaggttatttgtgtttcatatactctgtcacatcattattttaacatccttttttttttttttccggagacagggtttctctgtgtagctttggagcctatcctggcactcactctggagactaggctggcctcaaactcacagaaatccgcctgcctctgcctcccgagtgctgggattaaaggcgtgcgccaccaacacctggcctcacactcattcttatttactcattgttatctatgcatttcttacatgttgagagaagccagttgtttaagccattcccttgctgttcacatagtggcaaatatgcctctttacagctcaagagctggcatcctgacaaaaataaaaggcttcttcccttcctggcaaatgcagatttgcgattcagttttcctaaataatgatatgacagaaaaattattatctaagacctgatctttgctattttatagaaatgaccacaaagactgtatgaagcacattatatacggtacacctctcaggactttatgcacatggagtaagcaagacaaactggagactgatttatattatcttatgttatattttacctaataaataactaagaatacttagctcttgtttatttaagtctactaattcaagatattaaaagttaacatgtgcttctacaatagcatcaaattcactcagaagaccaacactataaaacttcaaattttatttattgtgagtgtgtgtgtgtgtgtgtgtgtgtgtgtgtgtgtgtgattcagggttggaactcaagtcttcagggttgcctaggaaatgttttttacccttttaacccataaggcgtcttatggccctctttgtaaagatttacatgtgagttttcttctgtcccttttcttcttgtgccgggatctaacctagggttttgtacatgacaggcaagtgctctctctacaactcacctccatctccaattcagcatgtgatttgtggctttattagattttattttgtttttcttgtattgaaaatagatttttttcatacaatatattctgattttggtttcctttccctctactctgctcagctcctccccacttgctctccaatccacatccactccttttctgtatatcattagaaaacaaacagtcatctaagggacaataataaaatataagacaaagcaaaaacaaactaattagaatagagcaatacaaataaggaagagagtccaagaaaaggcatgcaaaaaaaacaaaaaacaaaaaacaaaaaaaaacatatagatataaagacccaattattttgcgcactcaggaaaaccacagctaaaaataaaaataaaatttaaattttcttaaaaacagggagagaaaggaagaaaaaagccccgacaagatattatgagactaggaaccatcaaagatgccactgagtcacgttcatttagctttgaccatccactgcagggcatggggccttcccttaagagtggcttgttttaccagggaaattcaattgaagaaaactaatttttcattttcaagtggttatcgattagaaatagtttctgtttagagatgggggtgggaaatgtgcccacatctcctctcagctccaggacttcatctgctgcacaggtcgtgtgtatgctgccccagtttctgtgagttcttctgtgcatcatcctgctatgtttaggaggccttgtttccttggtctcctccatcccttctggctcttacactctttgtgccttttcatggttccatgatccctgagtggagggatttgatggagacatcccatttaaggctgagtgttccaagctctctcactctctgcacattttttagctgtaagtctctatatttgttctcatcttgtgctgaaggaagcttctctgatgatggaaaagcaagacactgatctatctatgagtatagaaaaatgttgttaggagtcattttattgctacattcttttatcataacagtagtatttggtttccccaagttccatggcctatctagtctcaggttcttagccactcaagcagtgttggatatggattccctttcatggagtgaaccttaaatcaaatcagatctttattcgttattcccacaagcattgcatcgctattgtaccttcatatctttccggcaagacatcatattagatggaaggatttgtaactggattgatgtttatctttctcattaggtatcatccaccagagtcccttccagtaccatgaatattagtccatagggtgagggttctagggttctagctcagcttctctgtctttaatgagttgtgtaggcactgtctccaagtcagcattgatatgttgctttgtttgtttctttgttttgttttttattttttttgagacagggttttgctatttagcctggatttgcttcaaacctgcaatcatcctacttcagcttcaaatgtatttcagtatgaatcccatgaacccctgctcctggctcatggataatttccttagaaacaaacaccaggatatttacacactgctcctctgtatttgatttgatgctttcttgtttcaaatatatctgtaacattggccttctgctgctttgagaacagaaaggctaacaagccattccatcagcactggcagcttgacttcacaccccaatactctgtaaaggcagacctgcctctaaactctatgaaccaaccctgatttgcatcaacattttcatcctttaatccctcatcatgttgttgcttcacacaataaaaaggcctctgaggcttggcttcggtagtggccaaattcaaaggcttactgggctgagcttgattccaaaatcctcagaaaaatgttttcctgttgcattgccggcctgcatgtgggcctatggtttgatatataaattatgagacgattgcttttcctgtttcaaacttgtttttcttgcttactaccatgtagaattataataagattttatctagaatattagaatttacatatgtgattttaattcagtaatagtatataaatgaatgttgagaatgatccatatccagggcaatgtgctgaatataagggaatggtctcaatggaattactatctagtcagggcaaccgacaaattcataattacttataaaagaatgttatagtgtcatacaataagaaaagaactaagaatctggcaacttttgtagagagagaatctagcctcctaggtacgtgtatgaccccaaatgttaaaatgagaggaaactgtttgtgacaaaggaattagcattaccagcagcatgaagaaaaaatatggactgtgttagtattctacagatgctgcagtgagagataaagctggaagagcagtggaaccaagtcagagagacttgaaatgtgatcctgaattttgaatttgttctatattcatggactcaatagagacctctgtttaagaaaaatgaggaagcaggtttggggatgcagtccaatccatagagtgcttgcctaacatgcacaaggctctgggttcaatgcccagaactagataaaaataaatgtggaggcacatggctagaatccctgcttgtgggaagcagaatcaggaggatcagaaattcaaggctgtcctcagctacacagggagtttgaagccagcctgggctacatgaaaccttatctcaaaaaaaaaaaaatcagaaactgagatgagaaggtaagttaggatgccactttcaaaagtcacagtcttttgagtgggggaaatgtgcatgttaaacttgagtgctgttctctagaaacattacccaggacagatatccaggactgtgaaggctataaggagctggaaggatcaactaagataaaatctaccactaataactaaggggaaaatatagtaaaagtccaaataatgaaagtttcaattacacttcatttgtggtcacatggatttgcctaacggagtctagacaaagagaaaatatatcttaaggaaagagaatcaatgtaaacagcatacatgcatgtagcgtttaatcttattggttaatagataaactgctatattggttggtcctagataccagaggcagttaggtagtttcatcctaggcataaataccccaagctctgggacagtagaaaagaaaataaaggggaaaaaacaaataatatagatgtttctcagaatttggagacctgatataaacgacgaaagggatagattctgagatttcaatatcctgtagtaggaagagtagaaatatgagactgggaatctaataggagaaatacatttgtaaaaataacagaatgtcaagttttatagagaaaagaagcagcatttcagatgcctgccaggtatgttcatgaagattttattagaaattaagtacagtgcttctaaaaaatttctgagaaagagatgatatttgaagaaaagggtgaagatttatagtcattaaaaatattagcttgagccaggcacagtggcatatgcttttaatcctactactcagaaaacagaggcagactggtctctgtaggcttaatgccagcctggcaacacagtgagaacctgtctcaaggggaagaaaaggaaaagaaatattatttgaagctatgggagtaaaaacagttaccaaagaatagcatggagagcagtggttctcaaccttcctgatgctgggaccctttagtatagttctacatgctgtggtgacccccaaccacaaagtatttgttttttctacttcaaaactgtaattttgctacttttatgaatcataaagtaaatatctgtgttctctgatgttcttaggtgactcctgtgaaagggtctcttgaccccagtggggtctcgacccacagattgagaaccactgaggtaaagattaatgagaaccaagaaataagtctccaaaaagctgaatttaagtgtaaataggaaaaataaatcatctaaggaaaatgcataacattatttattactcatcatagagtctgagattttaatactgaatgatggccagggatgagggaaaagatgttggtaccatgatacaataacaaagattggaaatctaaaaagagaaatatttttgatattgaatggctgagtgctgagggaaaaacacacacatgtgcaggtaaactgggtgtaatggttagcagaagcagccctagacattcctaagatagaggtgcaaggatgcgtgcaggcagagttcaagcccagcctgggagacagcccagcctggaagacatagtaaggccttatctaaaaagcaagtaaacagacaacaaaaacacccacattcagacgtgtgagatggtatccaaaacagtgaaatagcacagaagctattcattaacttaaaagaagagtagtcacagaaaagtccaaaaggaagaagccttgggtaacattaaagacagaagccagtgagcagattgtggtgttttcaaaataatgtatcattggaagactgcatccaattaaaccaaaggtaaaattgctcagaacttcagttcggaaactgtttaagaggcagctcagcagccaaatatgaaagtctaatctcttcagtcaaaggatacttggtattcatcattagtcttcccctttcctttctttgctcccttctagcctttattcagcacatgttattattctccccttttggccacacctggtagccattttctgtaatataattttctgatgttggcctatgaacaggcagacataggaaagggagctttacattgtagttcaacattcatttagggaatcaaattccagcttgtacttagaatgtgccagaaaatacacaggggcccaaaattccatttgtgtgctggaagaatgcttttagtgctggaggtttgtactttataaattacattagcttcaagccttcttagatatgtgtttatccattaaaactaatgcacaaagtgcatgaatagatacacaccgagataattgtgttacctactcattggtatgtaaaatacccgaacaaaacaacttcagaagggaaagattattccggaccatagtttcacaagtttcacttcacagctagctggttccagtgctgtgggcttgaggtgctaaagcggaacactaggaagaaatcccacctatctaagggtcatcagaaatcagagaaagagacaggactggctcagggagcagataaagccttcaaagtacaactccagtgagctactttctctaacccatctccatctcttagtctctataacagtttaataagccttcccattatgaatccatctatgaattaatccactgattatgttaaaggttcccttcttcaaaggccaagctctgaacattgatgggggaagtccttctgtgtatgtttgtcttattggttgataaataaagcactgttggccaatagggaagcaagataggtggagctaggagtcatggaggattctgagaaatgtagtaatgacggaagtctccatgtgagccctgggaagagaggacacataaggcctgcgtcctagataagataagtctctataaaatatatagattagtagttatggttgataattaagactgagctagcttatgagaaatcctagtcattggccagcagcattgtaactaacataagactctgtatgctgtttgggggccctattgtggcagccaggctcaggcagcaggcggaaagagttatcgttacataacaggaactaagcaagcctgcacaacagaagcctttggaagacattcatatccaaataccaataatctgtaacgagtctttctctgtcctgccagccagctcacaaatgatgatttggagacttattattaattacgaaagctccaccatagctcaggcttgctcctaagtagtgcttatgacttaaattaacccatattttgaaatctgcattcttttacatggtttagttacctttttactctgtactgcccattctactcccttggcatctggctggccactgtgcctttcttcctctcaaagtcttttctgtccccagaagtcctgcctaacctcttcctcgctagctattggccatccagccctttattaaaccactctccgtgacacatcttcacacagtgtaaaggaatattctgcaacaataatcctttacttctgccaatatgtacaaatagaaatattttcattataataacggcaaggaatatgagtatgagagccaaatgattttgcttattcaaatagattactttttatttttctgagtttttttttctcctggccacttctagaaagctgaacagcttacatttagacagtgggctgaacaatggaaataagttcgagacctttattttgattctagacagtacattcagtttgtaacttttcagtgacactgacttggagggcgatggaacattcagagcttttttcctgtggccctaaaagatgaggaatcttagctatgctagccatctttgcacattggaacattccaacagaaagggactacataacaagccacagaaataaagaggtgattaatatgaacaatgttggtctagaactgtggttctcaaactataccgtgtcaaccaaagtattagcattacatcaaaatttgttataaataattctctttttaaagttttatttcatgctagacatatgggtgttttgtctgcatatgtatctgtgtaccatgtgcaggattggtacctgtggctgttagaagagggcattggatcctctgaaactaatgttacagatgattgtgaactgccatgtgggtatgagaaatctaacccaggccctctacaatggaaagtcagttcttttaactgccgagccatctctacaaccacagaaataaatatttttgagacatggtctcatgtcccccagactggcttcaaactctcagtgtagcaaaggatgaccttaaactgatcttccagactcttcctcgaaattactgggattataggtgtgtgtgtgtgtgtgtgtgtgtgtgaccatgtctgagtctatgtggaattggatatcaaaccaggacttcatgattacaaaggaaacattctaccaaccaagataggcaccaaccaagactgttacattgaaaactttagtgagataaaaaaatttggatttcaataagtcttccaaatgattttgatgcactgatgtttgaaaactccttaaggcagaaacaaataagccagagggctagagaaaagaacagacagaagaataaatcactagtggtggagatgtgattgaagtaagaaggtgaaaactactactgactgcctcctcaagaacagtttttacatgcagatatttcaaaagtaccaaactgcacatttaacaggcagcaatacattgcatggaaagggaagccaaatgtttagtgaagtcaggatcatagaatagagttgatgatataagacatgaatcaagtgcaaaccagcaggcactctcaggagtggaacaatgcacacggctggcagatgagggagaggcaaaagcagcagggtcaagggcagcagatgaacacattacagttgtctcagcatcatgtgaatgggtgttaaaaagaacaaggcattcagtgtaatctctgcatctatggggagtattgcctataaaactttcatctcatctgtagccctcaacggcacagaatttctcatgccaacagaaaacagaaatgaatctataagaagcaggtagctttaaagctgactcaaacggtttgtaaacaagcctttgtcatgcttcacatatgttcactaagaggccttctagtgaaagaaagaaatgaagagagagagagagagagagagagacagacagacagacagacagacaaagacagagagagacagagacagacagagagacagagagagagagggagggagagagggagggaggaagggagagagagagagagggaggaagagagaggaaatcttgtagaggatgctacctgggactggtagagacccacatatttgcagccaaggacctggaaaactatataatacctgtccaaccaggcttgatgctatggaggatgagctaggaggaagtctttggtgtgtcattggtgtctacatattcatttggacagatgggacaaggcagagagagataataaagataatgtgacagggcaagacaatggaaaggtttctccatcttgtattcttgctgagaccatttcaggtttaactagaattgggtctctttgatgaataatcccaatgaaaataatccaactctacaaaacaaaggtcaggatgtcctagctaacttaaacaccttctgttcaactgcctgtttgtgtggaatctctccagctacatgcttatctaagcttctgttaaactacttgcttccacaacggccacaagcagctgctgagctagatgccaatacatggaatttgccttcaaaactcatgtgctctaaacacttggggtcacacctagatcctggagtagctgggtgtggtcccagccagttggaatatagactttcaactgcctataaactatgtctgagtggtcatctctggtgggttaccaatagtaatacagatagcaaaagcctgcattggacatcaagcacatagcattttgttgattgtgaaaagatccaatctgactgcatgtaccaaagatccaacttccaaactgaaaatagtttgtagtcatcttcccaccaggacacaactaacagataaagattcttgattcaaatacattcttctgtctgatgcctgatttggggcacattgcttaatcatgtttcttcctctgtgaagtggtacctactttattgtagtcatcgggatcacataatgtagtgtatataaaatattaactaagatacaaaaaccgactaatatgtttcaataattattgtgagatgaagtatatgttatgatttattgcagccttgtggcattacccaagtaactgatctctacagtgccttagtttcccccacaaataaaatgaggctatggaatgatgcaactactgtcctttgcaaagctcttgctaaagtacttggcatataacaagcacattatgaatgctgttacgtttcattccctcaaatgttttgtttttaatttttaaagctttacaatttttctttttatttacttttaaatttggcatacaggccaggaacgaagacaagctaactgccgaagctttcttcttcctccacaccctcaaatccaataccccagtcttatccccagccttgcagcagaacccatacagcaatgtcccaggcctgccatcgtcaatggatcacacagatcttcacttccaaatttctgacccccactcattactttatcccagcccccaattccaatgggcattcacctggaacctgcaggccattcagatcaagggagggaaaataactacagatcctctgctccaaatccaattttccttttgctctgtagcaggccatctgctgtatcctcacctacctccctgcccccatctctagtggaacacacagatcttcccctcaagcctttcttttcccagctcattgctttatcccagtgcctaatcccaataagcattccttggaaacctgaaggccagtccaggtagggggaaaagactaactgcagaccttcaccattctcttactttctccatatcctatcccttagtttcatcaacaattctgtagcacactacctgttgtggcctcttctcactcttttcccacattcccaggggactaagcagatcctggtggaacaccctgttttccttcctcctgtgaacccccttgccactaccccagacaatccccattcctaagaatcagctcccaatacctagaaacacattttaccaggaaaccccactgtacctagcgggatcccaaaagaatctcctatcaggcaacacacagtctcaacaccttcctaggaagcagagaggaaagcagaaaccagcgtggaaaacacccaacaaagataagaccacatatcatcacctcgggaatttcaatcttccaaacccagatgccaagacaccagcacaaacacaaatcaataacagttaagacaatatgtctccactggagcccagcgactctaccacagtagagtctgagtattgcaacatagcagaagaataagacaaagtccttaaagtaacccttatgcatattatagaagcctttaaggaggaagtgaataaatgacttaaagagtctatgaaagaagcagaggcagtgacacacagccaaggactgggctgagctcctgaagtacagttgaagagaggggggagggataatatgaatgggggggtgtcaagagcatgaggggggaaaaccacagagacagctgacccaagctaatgggagttcaaggactatggactgacagctggggaacctacatggaactacaccttctatcctatcctatcttggtgaatccatgtgaagtttcttcaattcctatcatcttctctgaagtacattggtgccgtcaggagaaaacatttctcattgtcattaaaaatacctatgttattaaaacattttaaatgtcatattctgtagatcaggatatccaagaggatccccattatcagtggcatagtagaagccagaggccttgagccagaccaatgactcttagcaatgaacacttgcaagtaaagatgaatggactaaagggtaaactgtgtgactcaataggccatactacatcttccacaagattcttctcctttcttttgttttgtttgggttttggttgttttaggggatgggaggttgcaagggtagagggtagatatcagtggataagagggatgggaatgcatgatgtaaaaactgcaaagaatcaataaaagttaaaaaggtagtattcaattgttcattcctagactatagaaatacattccagttattgaaatgaattgattcttgattcttgcagcttggctaaccccccttttgaagtctagtagcttctttgtagatgcttttagattatctatatacaaaatcatgtcttctgcaagaaaaaaaagacaattttacttcatcctttgcaacctggttgcttttcatttctttttctgatgctgagtagtatagactggaatgacaattcatagtgctgaatagtaattgctagaaaagggttagacttttgttaacttcttgatttcaacatttagtataaagttttattgaccaagacaaatatagaagggcccatacatattttatacaatatacaaaaagtaactctaagtaaatcaaaagaccaaatgaaaatctaatgtatagcacacctgggataaaatatagatttaatgttcttgtttgtatgtgtgggagagggtttctctatgtagtcttgactgtaccagaattccatatgtagaccaggctgggctcaaattcaaagagatcagcctgcctctgcctgcagagtgctagaattaaaggtgtgtgctaccaagcctggcttacatgtaatgttctcgatattggtttttctatataagcatcaaaggacaatgttgaaaaataaatagatgaactcaactttaccaaagtgaaatacttttgccatttcagaaaaacaccattgaaaactaaaacattgttcatagtagccaacagacaaaacaatccaagtgttcaccaatttatatatggataagcaaaatgcactatgacaatttagtagaatatcattgagttccagaccagcctgctctacaagagctagttctaggacagcctgcaaagccacagagaaaccctgtctcaaaaaacaaaaaacaaaacaaaaaaattgactcatttgaacacattgcactaagtatagggaaccaataacagagtgacaaattatgattccatttataagaaatgtccagaagtggcaaattagtaaaagcaaagactcatcaatctttcaagtattctgagtaggtaaaagaaatgctttatttatttatttatttatttattgttaatgtaatatgtactggcagtttagagtggagatagttttataacattgtgaatatagtcaaactatacagttattgatatacacatttacctagttatttgtttgtttatttgtgttgctgggtagggtaatgtgtggagatcctaagacaatttccatcacatgggttctgggaataaaactcaggttttcaggcttagcagcaagcacctatacctgctgagcctgcttactggcttctgagctacatatttttgaaagagttatggtatattaattatatcacagttttaaaagaatatattaagtagctataaaacaaagtagtttttcttacagagcttgttgcatattataaatggtcatttcagaagtcttgtgtaatgtttgtattacatagatgtgatggcttttattgtctgtcaaattgactgcatcagaaattaactaaaaacccaacattcaccacagcctgtaggccattctaattctgtctgtctgtctgtctgtctgtctgtctgtctgtctgtctatagtttatgaactaagatctttagctcttaacaattctgtccttaagtcatatttccttatgtcatatttctcttaatttgttatacaaagactactattttgagtctattacaacaacaaacaggattctttccttgatttcatgatggtgtttacagtgatcaaaaaactcctctttccacttctatgaatgtctttgaaagaccaaagagaaaagaaacttaaagttaagaatcactggtgtatgtgagtctttatgatatgtttatcctcaggggtcaggaaaaatgtgactttataaaaataactaagctgaactaaatgcttcttgaagtgcatcataatatcaagataaacttttaagataaataatgctatctaaatgatataggacttgataatgaattgtgttaactcaccacatttttttctatggttgtttggttgttgcatatctttaggggatatgttatagttcttggcaaacaactcatgcataattttttgagcagtccttagaattctgagtacacacactctctcttttaccctccacccccacacctatacatatccctgtgtataatgatagcttaacttctagtatactatcaggattatttttaatttgggtaacatattatgcaaaatcaaatcatgaccatctttcatgctaaaactaatatatttctatagactttttgacaaattggaacatagtattttataatatattttattcaatatctatagtaagtggtttttcaaatttcagaataaaagctaaatggatgaataaattacatattacaaaaaataatgacctaatactttatgtagtggtgttaattaggtcgataattagttgtagtttactttcctgttgttgtgataaagtattcaccaaaagcaacttggggagaaaagggtttatttgagctttcactttacagcccattcctggagaaagtcagagcaggaactcaaacagggcaggaacctggtggtaggagctggtgcagaggccatgggtgttgcttaactggcttgccccctgtggctttgttcagtgtttcttaaataactcagtacctcttgccaggggtggcaaagtaccagtgggatgggccctcccacatcaataattaatcaagaaaatgcctccacaggctcgcccaaagggcaatctgatggaagccattcctcagttgaggttccctcttcccaggcgactctgcataaagttgataaaaaaaaaagagccagcacagcaatattctgtaactaatatattgcttcacctttgctggcttgctatgggtctaactaaatttggctttcaaaacttcgtttcttcctttagcagtatttaatacattttattgtgcttgcttatttatgctatttctattctttctgatctcaaaagtcttcaagggaaacaaatgtatttactttgtcaatctagccataacacctacttaagtacctaggaaagcatgggcaatagaacatgctcatggattcctcccgtggaatagacctttattttaaagggcaggtttgtttatttatttgtttgtttacttattttgagacagagtgtctatgaagccctgtctggcactgtactcacagatatctccctgcctctgcctcctaaatgctgtggttaaaatcatatgccaccaggctcagctggataaaacctataaaatggtaactcacaaattgatattatgagcaatagctgtaatagcctgactacttaatccccagactcacagcaattcagatgtggttgtgtacattggcaagccgaacactcgtaaggtgaaatgggtagaggaggcagggaaattggtaaaatgggcagacgagccaggaaaattgcttggaagggaatgggccagatggcttggagtacgtagtgtgacagaaataagagacccatcttcaataggtagaaggtgagaattgacttggaatagctgtcctatcacctccatacacacaccatggtgtatgtatgtgcacacaggataagtagatacacacaagtaaataaatacatttaaaattgcattatgtatgcatatatggaattttgtgttaatgtatgtgaaaatctgaagtaataagtgttatgtgttaaacagtttctgccaaaattcatgttgaaatcctatttaaaaatatgacagtatttaaagatggggccttttaagaggtaattaagttaaaataaggggtccaaatcaattatgacttgtgtttttataagaagagaaaattaggacatacagagaaagactttgtgaagtcacaaggagacagttatctggaagttagggacataggctttagaaggaagccatactgcttgacattgaacttttacccctcagaattgttagaaaataattatctattttttaagtcacccacttcatggaacattctggggagcgctagcagttaatacaatagcaggctaaactaataaaatcactgcaaggtagttttagtaaatgtaatattttctaatacaaaataaatgtcatggtcctataggaatattagtatacgttccagaaaaatgtaactctctagtggcccagtgtttcattgctttagtgtctttccctgtagaactgtgcaaaacttaaaggttttcctttaagtttcgaggctcttcctcccttttttcttttctttttgcttggtttttcttatttcaattcctttcttccttcttactgctctttctttctttttcttcaagaatttctcatctcatatagcgaccaaccaaaagtattacaacataagtgacagcttattttcccttttatacctcttacatgtcctagaaagccttctaattcctggttaatggaggctatgccatctgcttcgcattcattactaacttaataacacaatatgtggtccagaaaatttatgttagaaaacattgaattataaacaaaattaatatatctgtgaagagaagagctagttctttaatgaaatttttatcattctttatgttctgttttgaagtaagaactaaattaatcgtatctcaggaaagggccaggtataatactagctttgaagaggacaattgtttatatatcttttttcccagagaagttacaggggatgactaagaacattggacttattctgaaaccaaaaggtaagaaagtttgatgccatgattctaacctgatgtgcccaactctggaaggtcatatagatagattctttgacacagtaacaaagcgcattaacagattactcagaagaaggattctcatcacagtaggatatatgtatgtattatgtatgtatgtatgtatgtatgtatgtatgtatgtatgtatgtatgtatgtatgtatgccatcaatttaatgtgaaagcaaagccctgtgattccataaagacaaaagattaattcatggtttacctagttcatgatgtcccttcaagcaaggcatttctaaacttatcatgatgtatctttcttttttcttaatggtttctttattattattttttaaaattaacaacaagcttgcttcacatgtcaatcccagctccctctccctctctcctctctcaccctccaccaaccctcccttttgatttcatgtgcattcatgttttgcctgcatgtatgcctgtgtgaagttgttggattccctgaaactggaatcataggcagttatgagctgccatgtgggtgctgggaaatgaaccctggtcccccggagagccagtgctctcaactgctgagccatttttccaaccctgatgtatctttctttaaacactttttcttacttaacagtagctttcttttttaaaaaaaattcctttttatcaaaattattttttcatacaatatattctgatctctgttttccctctcccatcttctctcaaatcctctctacttctctgttcatctaacttcatgccacctttctccctatctttagaaaacaaacaggcaaattaaaaacaaatcttttttaggataaaaattaaggaaacatggaaatttttatctccaatattattaatgaattgtaaagcaaacacttggtaattttaggtagtatcagttcattaggaaaggctgataaagtgtcagataacaagctaaaaaagtgaaagcaaacccagggtaattcatggctgtgtttttgtcattagtgttttaatgaccacacccagtcaaccaaatcaagtgttcatttttctttcacggagttgaccttgtgtatgtcctgggtaacttgggaccagcttagaggatagctactcgtcttagtcatgtttggctcatttttcagcttaagtaaagcaaaacctatgaagtcaattatattcttgcaaaacatcccaatctccaaacgcttgatttcccactgtctccctgctaatgctggcaaatttaagattccaattttttgaactcatcaactccaaagcctttaggcccacttcactctagctgcttcttccaaggtcacaccttcaattactttgcacaaaatttaatatagtatttgttttgataaatgccttatgtgagtctctcatgccagtgaactgttgaccacactttgaggaacactgcccatatactaggatatacagctgaaggatgcttgagaattttttcatttgaagtcctttgttttccttgtaaaatagatgattgttttcttgccccaattccatccacacacacctatacatcccttaaattgaagtaaagcccttcatgcagtatctcatcacaagctagccaatcttattttgagtcactagagtatcttatttttgcctttaagtggtacttatcacacattgtgacaatggattgcttttactttcttaaatcatgaaactcatcagagtttggcttttgtagttttctttattttttacacattccctggatattatcacacatactcatggtttcaactcttacctgtatgcttatcagaattttgtctgcagccttcatgtctcttctgactctcagattcatacctccagttgtatattaaataccttcacttgattgataaatgtatctcctgtctcaatgttcaaagctgatcttactttccttctgtattcacaacctctatccaaagcctcctctaactctctgttttagaaaaccacctctttattcatgcagttgaagatagacacagcagtcattctacattccttctctcttctttccactgttcaaagctgtcagttctgacacatatcccagatttctgttctctacattcttctagtattactttctataaaatccagtttactgaaaactacggcagttcatggaagaactaacattaaataaaggcaagaggcaaatagttatatgtattgattcttccaaaaattgtccatgtgtatcccatttctcaagataatgattattgacataacagtagatagcagtattgctaatctcatattggattaaatatataatattaaaagtcaataaatcaataaatagcagtgttacttgaaatacagtgctgaagaaacacactaaaaacatcctgaagatatcatcggacaaattcagaatatgacaaggggaaatgaagttaactgaaccatttagattactagagataaataatactacatgctaatattatttgatcctaatcaaataaacaagagtattcttaagaaacttgagaaattttgaacacaggtttgttactgagtgttagtaaattattatgaaaaggatatgtatttgtttcgttggttttgttgtttattttctgaaacagggtctcacgtagtccagctggccccaacttcactatgtacctgaagctggctttgaacatctgatgttctttcttctatctcctgaaagctaagattacaggcctataccaccatgcctagtttaggattagttttaaaaataatcgtcttctagagattcttaaggaaaggacagtttttgtcacaaaagaaagcatctaggagtcaaaccttatgcaaagtaggaggccaggatccagacccagcaggcagcataacttgtacttctgaatttatcaagaaaggtacaggaataaaaacattgtgtgactggggcttctgtgcatagagtgaaggattgggaggtgtggccttgttggaagaggtgtgtcactaagaatgggctttgaggtttcaaaatcccattaggcccagttctctctctctctctctctctctctctctctctctctctctctatctatctctatctctatctctctctctttctctcagctactgttccagtgccatgcctgcatgtctgctgctatgttccttatcatgattgccatggacttaccctctgaaagtgtaagcaagcccccaattaaatgctttcttttataaattgcctagtcatggtgtctcttcacagcaataaaacagtgactaagataggatataacaggaacgttggactgtaattatactatgttgttcagattgctttcacaaacaatattaatgatgtgcaacttgttggagtcttgtgctttggtttccatggctaggtgtgtagactgttgtgtatccagccttctatcagcctcctatgaaaacctcagacttgaatggtgtcttagggttttattactgtgaagagacaccatgaccaaggcaaatcttataaaagaaaatatttaatggaggctggcttacagttcagaggtttagtccattattgccatagtaggtaacatggtggcatgtaggcagatatggtgctggagaggtagctgagaggatttgcaggaagcaggaagagagagtgagccactaggccttgcttgaacttctgctctcaaagctcaccacccagtgacacacttcctccaacaaggacacatctatccaacaaggccatacctcctaacagtgtcactccatatgggcccaagaagatcatttttattcaaatctccataaatgggttcctatgtatagagaagttttataaaatatatcgccacagttcacagtcaatggattttttatatgttatataaaaagttttatgtattataaaaaaagggaaaaagtatgtctgataagattccacattggaaagcactccacagcctctgcgtgaaacactctgggctgcatgccacacatgcttctttcttattttcatttgtactattgctgcaaccctgaatggcctcagcaattgacttaactgggatgaggaatggaaggggaaagggccagttacaaggacacaagtacagaaaaactgttatcaggtgagatgtgcttgctctgttggaagagccaccataccttggaagcccagggtttattagatacagttgaatagggaggcaaggttattgcatataactgagctgggaggcaggctcattattattatttttatttaaattagaaacaagcttgttttacatgtcaatttcagttccctctccctcgcctcctctgcacccccacctacatctctatcccaacccctttctgttccccagggagggtgaggccttccattggagaatcttcaagtctgtcatatcatttagagcaggacgtagacccttcccagtgtgtctaggctgagagagtatacctctatgtggagtgggctcccaaacttcatttgtgtactaggggtaaatactgatctactaccagaggccccattgattgtctagacccccaaactgacttaaagacaggctcattatatacatatgcacaagaagatagaattatatacagctgaacaggtttagctaatttgggtagaagcagtctctgccttggaggagtcttcaggctctaatcacacacgggcagaaagctttgttagtcatttctgcacacattcacaactcagatcagagggagactttgttatccctctgagccttgcccaaggaaggcttttcctctctcatgtagctgagacactgggttacttgaaggttgagcagggaggtagggctatttcatatagctgagcaaggaggcaggatcacactatatatataacaccaaaagtacatgtcaaaaatacacatttacacagaatacttgttccctatgtactatatatcttttctgagacaaatgctagtcaccagtacagcccatttttggagctttatgctctctagtgaattagtgaacttgtggttgtgctaagacccccgatataaataagaaaagaatttgaagacatttcaacaaaggaaagaatgcataagtttaacatgaaaaataaattacccagagactgatattggggttcaaacttcaagctgaatattggacaagcaaggtagttagttggccactagcttcttccctctacctcaggctgaatgggctagtcctgtctccacaagctctcaccaagcctcagactataacctctcttcagcgtggctggagaatgaatgcctcatattgcctacttgctcctgtcttttatacccctcttgtgctgggattaaaggtgtgagctataattctctttcagactggttcaatcttgagtagatctaggtgaccttgaaatcacagagatccttctatctcttaatcctgagtcctgggagtaaaggtgtgtaccaccacctcctagcttctggctgctgggactaaaagtgtgtatcaccactgcctgatctctatagcttgaggctgactttgcttttctgaatcctcagtcaagctttaataaatcataagcaatatatcactaaacttaagtacataagaaactgtctgataatactagtcaggtagaaagttcaggacaaactacaatgatgtagtaacatgcctatgagacattgactaacaataaaaatttcatcatagcaagtatgtaaggactgaagctttcacatattattgatatgaaaaataatttggcaagtttcttaatatgactggcatacaatgaagtaattctgttagtatggccctaccaaaatgaaataaaatatatgctgaaaaggactgtctacaatggatttatttatagaaccacaaaactgagaataatccaaatgtattttataaccattcaatggacaatgacctagcataccaaaagaaagaagtgtggatccacagactaacataaacaaatctcagaataaggatgctacatgaaagaagtcagaccaaaagcaaattgtgtgtatgtaagcttacatcaatttaaaactataagaaatgcaaataattcagaaagaatcagtacatttcagagtagagtaatggttcagggtaagacaggatgacctaagaaggaattttccaggatcaagaggcaaaacttagtggcagaacatgtgccttgaatgtgtaaggctctgagttcaatctgagcacctaagagaacaaaagcagcaaaaatgacagcacaaaaacatgttgtggcagtggatttattcattaccttgatcttggcaatgatatcagggttgtatatgaacttgaagacattgtgttttaaagtacatgcagttaactgtattttcaattatgacaaaatataaaatgataaatactatttatgaaaaaaatggctcaatgttgtagatcctaaattctcactggtgttcctagcaatcaaaattgtttctgctgcaagcaacagaacaaaaatagggttttcaggaagtgaataaggtggagatggctggatggcagggctagaagttagacttagctccctcactgggagctgggtagtaaggcactcattatttttgtagctggatgataggtacatagatttttattacagaaaagtcttattaatacacgagtcattagtttatacagaactaaaactcaaattattttaaaggatttgtgcactgtgaatgaaaatgagggaaatggaagaaagaggaacagccattatgctccttaaatttgtactctgtttgtgttattgtgtctctaaaaatacaaaagcagggttcataagtaaatagcagacacatataaatatgttcttcttaagttgtataaatcagttaattattaatgcagtacatttagccactttcataattgctcatcttttaaaaactggagtataaaaatgttcagacttgttataacttgttcagtttgtaaaatgatttctaaatttggaaattataagtactcacatatttgaaagctattaagtttttatttcagaatatataattttggtagagcattaagagttgaaaagaattgttgacaagctacttgtacatattatgcatcaaatatcttgtactgctattttagaggcattttcattatattagacatacccattatccttcttcacataattaaaagaaaaatacctagaaaaggagagaattcaaggcagaaaaaaggaatgtctccctttttcttcttatctatttatttttggagaatctttttcattttcatgaggatttattttcttataacttaaagtctataaatttaggaagtttcagttgatgaaagtgttaccctaccctaagtgagtgaaaaattaattgctaataaactggaggacaaagaccatagggaatcttttagtggatcccattcatgtatctttacaagtgacatcacagggcagttttatggaagaatcttgttctttatcttcaatggaacaacctctaaatagtttcatttatttttttccaaaacagactcaatatcctaaaacacccttaatatatgtcacctggtaccttccatcactgaatttacctaaagttttctttaacagaggctgtgcaggagggtactaagggcacacattgccaacaaacttgagttggaattacacatcttgagcaatacatttctttgggcatttgtctcatcacctatgaaatggagaaaagaaaagtggttacttcacaatttcattgtgcatattcaatgagaaagatttgagtgaattacatagcatagggcctctcattcaatttattgcatgtttgcctttgcattttctaggggtttataattaataaagtcagacccattcaattaattatagcctgggccaatctaaaagagtaaaatagtcaccacctacatagtgtgactttatttagaaggttgttagctctgctatgatttggatctattatgtctcccatgggctcctgtgtttgaacaactggtcccaatctggtagtgctgttttgggaggttgtggagacttttggaagtgagtcctagttggagaaagtgggttcctgggaaggatgccttgagagttatataatacagtacatttctggccccagtccctcagcctcatactctctgacacaggtgagaggtgctccttccaccatacctcctcatcatggctgtctctaccttcaaccaggaggcaaaagaaatccttcctctgttaatttgcttcggtaggtattctgtcagaaagaataaagtaaggaatactgtttctccttgctgtgcaagtatacacttctagaagaaaagaatctgctgttgatttccattcctctgttaatggacatttcggtgatcttctctgggttactagactatactggagaaactggagtccccttaggtttcttagtctcattaataagagaattaacaaactcagaagctggacaataatttaattagagtctaaaagaggaactccccagggtgggaaagttgtaaatatggtacctgcctggaggaggagaatggagaagagaaggaagaaaggccatagtatttcagctaagctacatggcaggctgcctggaggtagcaggcagtcacatagctttagataaagagtacaggagcccaaagtactggagagagaaattctaactggaactcatggtgtttttgagggtctttgctgggagtaaggaaaatgttagagggtaggtggagtttggagacgcaggaattaagaggaggaagtctccccttctcattctcctagatcaggagatcttgtccctttccccttctccaggggaccatttatgtctctcttagggtcctccttgtttcctagcttctctggcagtgtgcattgtaggctggtaatcctttattctatgtctaaaatccacatatgagtgagtacataccgtgtttgtctttttgtgattgggttacatagctcagaatggtttcttctagttccattcatttgcctgctaatttcaagattccattgttttttttttcttttctgatgagtagtactccattttgtaaacagatcacattttttctatccattcttcagttgaggggcatctaggttgcttccaggttctggctattacaaatagtgctgttatgaacatggttgaacagatgtccttgttatatgaatgtgcttcttttgggtgtatgcctaagagtgggattgctggatcttatggtagactgattcccattttcctgagaaatcgccatactgatttccaaattggcagtaccagttggctcaaatggactttgggagcccattccctaccgagggatactattgcagcccagatacagcaaggagggcctaggccctcccccatacaatatgactgactttgaaggtccttggtggagggcctcactatccctggggaggagtcagggggctgggttggggtggactgggtggggaacatgggaggatgggagggcaagggaatgggggctggatatgtaaatatgagtaattaaaaataagttttaaaaattggaaaaaaagaggaggaaagatatagtatcacattgaagcaataattattccactttagcatgattgaagatgggattcccttcctgagacaccctcacccacattcccgaggaatggtcccttggccaggtcctttgcccacccaattaactcttaagggaggagatgattcaattttccaccttccagtagagtctattattatattttaagttttctctttattatttttaattatgtgtatgaggtgcacatgaatgtaagtgtgtgatgatgccagatcccatggaaccggaagtagagatggttctgatatgtcccacatgggtgttgggaactgaactcaggtcctttggaagagcaacaagtgattttagccactgaacctgtactccagcccctagattccattctctacaacaatactaccattaaaatgccacatcttcactgactttgggtaaaattctgatgtactttgactccatgttttgtacacttaagcaatagatttaatgaagaatctaaaactattttggattctctgcagagcaaagccactgaacaaaaggcagtatatgtaactccctcaagctttatgccacggttagaaaagctgtttagtgcagtttctcaaacagttctaaccatcaaaaatcacctgcatcatttgttaaacaagtggactctggaacttggtccatttaggaaaaggttcaagaatgtgaaggtttaatgagcacccaagggatttgtaagaggtcacaagtttgaaattgttgaggaggttagaagcccagactttggaatgatactatatatgagttcaaattcaagcttctccctttggggatatctgatcacagagttaattaaccacccttaacctctgttttcatccctattacatgacaattaaatgaatcaattaatttaagacatatgtcttacaatggacattgagaattttagctggcattgttataatgttaacattgcttttaatttatttaaacttacatatgaatcttcagttcctgggcaaggttctatattgcccagtgacgatctagaactttttggtgggcaagtatgtggcaaagtctcattacacagtcctacctggaccacagtctgtaaatcactgtaataaatcccttctctctcctgctgctctccctccctgactctaaccagcaaccatggaacttgatgtgtagactagggtagatcaaacccacagatactgatctgtgtctgcctctctagtgctggcattaaatgtgtgctgtgtactaccatgccaggctaattaatattctagaactttttgcttgctctctggcatgcctttttctttggaagaaattagcttggctattatgattaagctgttgtgggtcacctttatgtttttaatcgttatgctttattatgcaaattaggcaaccaaagtatctgagggttccaattcacattctccactgtagatgtggatgcaacttgtgcctagaaagataatttttctcacaggacaagatctctcagacattaacctgagttctaacttgaaaaggcccaggaacattgcccttgaagttgcagtgtaggaaaatctttggaagattgtttgaaatttacctgctggttaacaggggatagagaaatggacaaaggaagacaaaataaagaggaagtcaaagccttttactggcaataacaaagaaaaggcaatgggactgatacagatagatggacagtgccacacagaggtagcaaggggttgggctgtgggagagagaaaaacaaagagggagagaacagaaagccagggagagctggacagaaatgaacacagtacagaaagacagggaaagnnnnnnnnnnnnnnnnnnnnnnnnnnnnnnnnnnnnnnnnnnnnnnnnnnnnnnnnnnnnnnnnnnnnnnnnngaaagagaccaacccgtactgggatgaaacttgttatatagacagacaggttttgtgcagggaatttcccaaatagttgaaggaagagaaatcaattcatctcacacaattttaaagtacttgctatagaaaaggcatggggaaatagataaggcagagtgtgataagcatcattaaaagtcaaatgctttttagtcccttgaaggaaaaaaaaaacacatgcattcagttggaggatgatgtggaagcctgaaggacaaatgaagatttataattggaaagggaagggatttttccaactgagagaatggctagtaagaactgtgaagaagcaaaaggcacatgttcaggaaaggagcaatagcttctggctaaagtgtaggctagtgagcatgagcactgcaaaagggggtcatttgtaaatgcacatgctcgggccttcctcctgggtgcatggtatcagagtgtctgagaacagttctgtattttctctacaaatcacaggtatatatggtataggaggaagtcaaaggtggctttcgttgtcacaactgaagaggtttgaaacgctatggactaaggacgtagatctgatttactgttgagtcactttggctcaggctcagtgaaccagaaaggtcatggtttgagtctcagctgctgtactgtactgagttgtgcttacagcctatgcaaatgaggccggatgacagctggagatgagtgctaattaattaaacctggttttaggtcatgccaccgacaggcagatatattttcttttttatttggagactgcatttgaaaacacagtctttttttagttaaatgggggtgaaaagaataggaaggatctgccatctgagactgtcttttgacttctcaaactttgtgttgattcctatcaagacttaagtagtttcctctaaagcagtgtcagaactcttgaattgtgactcattggtaaattatgttaggaatgtatttgaaaatcaaaaacaaggtgtacactgcaggaactctttgaaatggcatttagactttttaaaagtaaagcagaaatatttttttcagtgctatttgaaacatgagggatatgtttgtattgtcatggtatgtagtttgtgaaaccatctcactattttatgctaagtgtccttcagctatgaaaaactgctcaagggaggcctggtttgccttttccttaaccgaagaaccagaggtcaggactcctgctgatggtaaaagagagtttgagatttcacacgaacagtgattttctgttgctatttaagcctttggctgttaattattactaaaagtatagtctccttttccaattagccagatggtaaacttgttagtctgttttctgtcacggtggcaacatagttcgtatagaaataaacaacttaaaaggaagaaaccttaactttggctcacaggttcaggagtttctgtccaggatctcctgctcctgctactttgggactgcagcaaggcagaacatcgtggtaggaagcatgcaatagaccaatactgtttacatcaaggtggccaggaaggcagagccagcaaatggccattttatccaactacgcccaaccttcagaagtttccaactctttccaccagcatcatcagctggaaccaagggtttttttgtttctttgttttgtttttaaacacaggagcttcatgaggacaggcacctagccacagccttccccatattcttctgcctagtactagattgtatgtgtagcaggtcctcccagagatttaatagaattagcagtgggatagaaatgtaagaattgcaacacatcatcccagtaacgtctcattgccttcaaagagcagcacgaaatgagagaaggtgaaaatgtggctcatctattccagtttatattatatattcctatttatattttataccctgaagactgctctacttacaattgattataattgagtcacaatgaggaaaatgtatagaaaaccaaggaaactggcatagcacatttaaaggagttgagggaaagactcattccttcccttagtgtcagtaggccccaataatagacatttgaatgaatctgttcactaccacatttgtatgaaaatgaatggatggacacctactttaatgcccattacttcaagtgaattgtgtgtaaaaattgggaacaaagagaagctgttctctgtgtagaccactagggctagagttgaagttgtcttacgcaaagaagatttggcattacaaatagtgccattttataaaaagtgggtagtttagatttttgtctttttattgacacttcaaggttactaacaatggccactggtaaaaacaaggcctttctgagtattctaaaaaaaaaaaaatgtaactttcattttttcctgtcgctgtaattgtaaaccagaaataaaagagctgataggaccaccatttgggtgagaaagaagattacattccctagcttcctaaggttctgaaaaatcagaaaacactggggagatagttaaatgggtgttgtgacctagctggtatcagtcccatgctacagaggctatctattctggactgatatccttgcgggctgtgatcagaaccatccagacagccactggatcatccctgagtgggggctgtgtggacttggaaactcctagccacccaacatcgataaagaccagacacaggcatcttgtcatttcatgagggttctcagtccatgctgcaaacaggagtctctggattattctagcatcctcctaagcagcttcttaaatattggcacgtgaccgcagagaccatcttctattaactcattcctccgttggctctctcagcacacctaaaaacacatagagttctctagccacatagagttctcagcacaggttcagcacattcaaggtctagccctgttctaacacaaaccaagagatattcttcactgaggccatgccatccagcagcaattagttagcatctgcaatacaatggaggttcaggtttctgaaaatggagccagaggtttggaccctgagaaactttctaatagaaaatttttggtccccgacaagtgggtaaaatgcttgctgagttcagatccctagcacccatgataaaatactaggccttgtgctgtgtgcctgcaatcctggtgctggaggcagagaaaagcagattctagtgacttgatgacaagccagtctaactaatcagttcatttcgaaacccagtctcaaaaatagagtgatagaaaaatgcatctgatgttgacctctgactttccaggtccatacatgggtgagatgtgcattcatacacacacatatagataaaaaggaccaaaaagcattatgaaaatttgtccaaattatgtttcataatttaaaaatttaattcattggaatatttctcagaattattatcaaaagtctgtttctaagttgggctctaattattagctgacaaaatgctcatgaagtgaattcaaccccacctacacatgtcaaaactaggatttagtttcactgacagaacagagaggtgacaaaaggattgagtagggatcctagtgagatgtgcaggttataagaggcaaggaggttggaagtctgtgatgatcccaacaacaggtaattaaatagattccagttacactgtcaagtagaatgagaccattgacttggataaagagagtcattaaagagatgggaagaaacatgggatgaagatgcttgaaagtaggcttatcctagtcatgattaaagaaacattttatacatgagttctagagaaggtctgaagctaaatttgactataataaggcagaaggtcagaatgatacctacgatagagacagaagcactgatatctgagattatggctccataattgagaatgcagtaatctgtagatagttcaatgaaaccagttcttgggatcaataactgttgggaattctaaactaaatattaagattaatatgctatctctatttaaccaggtgcttactcccattcccaaacacaggaaaatgatttttttttctgtcagtcattatttctactcactgataacatctcatctcaaaatgttctctgccacacagtctttcaacaatgttcattaaatggtatttttcagatactgtgtcataccaagaggaataaaacacagacttcatttggccttagaaagcttacaggtttatgaatacagtaaccaactaaacagatgattcaggtacagcatataaaatgcccaaagaaactaaggagcatttattcattctgttaatcaaatgtatcaagtgccttctatttttaagcagtagtcaggaaagcagatgatgactttaaacctagacttgccgtgcataaaaatatatttccaagaaagccatcatagtgtgtgtgtgtaggggtggggcacagctgtatctcaggaggctaaagctggaagaccatgagttcaaggctagactgaattacacagcaaaattctgtctcaacaaataaacataattttttcctggtaaactaaatatttgttggcttgacacacctattgtttctattacatctgtaggcatatctagggtctccatatggggcgctactctaatccccactctaatctacattctcagatgctcctatggtgtataaactgtcccttctctgactgagggcccccatttacactttgccctgctgggtatattagtcttgcctgagatgacccaggctctatcctgttttcagctaggcagcaatttcaatggattgagtagtatctgttctttgggcagaatggaaacttgaagtaggtggatttctggatcttgggagcaactcatgacaactaggggggaggcatgacttgtggacataggacttgagttttggatattgctcctgggacagtagttgttggagtgggccaccctggatgtgaatttggtttgatcataatgaaggttgaagttaggatgttgatggctgggaataaacaaagcaaaggtccttggaaaatatattggggaaaattgtcctaactgacctactcatatgacctgtctcaatcagaagaaaagatctgttcctgcccctccccatggtcttattttattatttttattatattttcaagtctgggcactgtgaccttataacttcttccatcattgactagttcatgctctctctctccttctgggcctagcattttataaatatttacagaccacatggtctgtgtatttaggtctagagagctatcttggcctgtgataaaaccctagggcccacaagatgaaaggagagaataattcctctgtagctggttttcttttgggccaccaaccagctcccaaatcatgacatggagacggagcaatcattagttatgcatgcttgacctcagcttatgtttgtcctaatagctcttataacttaaattaaattaacctgtttctattcatctacattttgcttccaggctttttatcattctttcattctgtatgtcctacttcttgtctaactggtggatacctgtctggctggccttgggtttctccctctctttctccctgttctccagtttccttctcttcagcctagattcctcctactctttattctatctgcccaccagccctgcctatccatctactgtctagctgttggtattcagctttttattagaccaatcaggtaccttaggcagacaaggcaaaacagcagcacatctttacataattaaacaaatgcaacactgctttacataaagtaatatttcacaatatgccatgagcaagctattctctgatttcagtgtgtatgtgcatgcatgaaataaataaaatataattaacaaaacatttaaacttgtcttcttgctgggtatggtggtacatgccttttattccagcagaggcagatagatctttatgagttcaaaattagccaaagctaaatagggagaccatctctcaaaaaatatcaataaacaaagtaataaaaatggatgtgatggctagtcttgattgtcaacttgaccatatctataattaaataaaactcaagtagctgggtacacctgtgaagtttttttcttaattaaatcatttgaagtaggaagactcacctataatccagatcttttgaggtgggaagatccacttatagtgtgggtcacaccttctgctggcagcctatataaaggacatggaaaaagaaagcttttgctctttgcctgcttgtccttgttcttgctggaaagttcattctttcactggagttagagcttacttgttcaggattccagcatatgctaaagactagctgagacatccagcccgtggactgaataattactggattcctgaaccttcccttgggagacacccattgttggactagttgggccagggcctgtaagccagcataataaatcttcatatatataaatttgtgccttttattaaacatcatgaaatgcaatgataaacattaagttgaatattggaatttggtaatgctgtgttcaagagatataccccagtacagaaaacagtggtacaagcacagaggtaaagtcaagacattttaagtagaccaaactagatgggggcatgaagaaattgggaagagatgagctggtagggtaagttccttatagtgcaagctaacagtattgggctttaaattatgaatctttaaaaatagcttaatagcctcatcttagaaagaatatttgataagaatatttagaacgtttttgaaagggaagaggttaattgtaggcagactacattgaacacttagaatattttaggtcattaagaagaaatcaaatgtagtagaaattgaaattgatagaaaataatggagttattaattacaggtctctagaaaagaatcaaacatatcaaagagttaggatcaacacagattagatgctgaagtttaaacagaaggatatctcaaggatgacacacagatttttgtcttgggtgaccataaggttcattaagataggtacactacttacttttgggtagctatgatcaaaataccaaagagaacttatgggagaaattttttccataaagtttcagagattctgtctgtggttgcttgactccatgtacttaagaaatacattgtgtcagcagctgaagagggtgttcacatcatggcagacaggaaacagagagcaaagaacagactggagataagacttaacttttacagcttgggcatactccctaaaagccctagaacttgaaactttacagagaatatcaaacaaactgtctaacactattgacagagtaaacaagcaagaatatcacatctgtggttgtttaaatgagaattgtcccataggctcaggtatttgaatgtttggttcccagttggtggtactatttggggaggcaatggaacccttaggaggtggaatcttgttggaggaaatgcaccacttggggaaggtgttgagagtttacagcatctctccacttccagttgctctctctgctttgagttggaggttgaagacgtcatctcttagtttcctggtctgcctgacctcttctatgactcccagacattatagactcttatgttggaatcaaaagtcaagatgtaacatctttcttccaaaagttgcttttgatcatggtgtttatcacagtcacaaaaagtaactgatacaatagccaaaccataataagatatttctgacaaccaaagacaatttattcatttttctttcattctaaaaatgtctttctgaagtaacaataagatcacctcagttcttaaagttgatgttaatataaaaaaaacctcaagtctattgagagcaagataatcatattttatctttgcacaaaaatatgtctaggctgtcctttaatatccttgagaagactgataggtaaaaataagtaaaatgatactaaaacatctacaccacagaaactatagtaacatttattatatgttaatttatttcagcccagttccaagttaggtaagcagaaaatgatgaatggaaaacataaggaggatagaaatgtggtagaatagaatgttaacagatgctattttaaagatctgacatagctttgcatactttacacctttatgtgtctattgtgataactgtggcagggggtgcaggctgcagtctttgctaattaatgatataatttcaggttttccttgatacttccattaagttttttccccagtgtgtgttctttcaatccaatacagaaagctaaaaacccagacaagggcaaagagaatcactatcacctccattctctacacatagatgttctctctagttgggccaagactggattaagtactcagcaggctggcgcttttcatcagccatgtacctgacatgcaaatattactgtcaaagtctagtaacagtgatggccaccaaattagtggttgagtttggacatttgcacttgattgtataaacctggtgcctgtatttagataaaacaactatagaatggtaatcatgcttttatttaggcaagatctggcttattgctactgttctcttagtcaagtgagtctgaagggatcacttaaaggggcttagaaaagttgttgttgctgtatagatgctgtttctattctcaagcactggaagactgcttctaatggtccttgtgtgatggaagaatgacaaacacttgtggaataacgaggttcttatgagctagaagtatggattatgaagctgtttgttggattacttcagcttttatttattgacatctgaaaagaaaaactaaagaataagggattacttctaaaatttagttttgtggaggcttttcccataactgagtttgtcaaacactccttggaataatttcgggcacgaaagtaggatttgctaaattaccatttcaaggctcagagacccaggtatcaaatgtgcttttagccatctgtttaattctcatttttctgatgcagtgctcaatagtggagggtggggcatatgggttgaactataaaacagtccaaaagttttttttttgtgatctctgattacatttatcttacatccagaaggacaaaaattcatttttcttttatctttttttggtgtacatctcatcacagatggttttcatacaaatacatgatcttttcttgatttaccttaattattacctcttcctttcacttcctagggtattttgcaaaatcctagactatttctattccaaagcaggctagatatatatcagtacagaatcaaaggctcaccaatcaaaaagctgggaataagatggttgtatgcctatgaagacattatagtgatttgggtctcgaccaggtggtaaggtactagccataataataagatttacattgttgcaactttgcatggaagcagaaagctacaggaagaagcaatcatgccttaagagatgcacaacagaaaagaaaataataaaaaagaaagctaaagtcatagaaatggcctctaattccttctcatctttaaaggacacagagtcctatcttagggtcacgttcactctggactatcctagatgtccctgcttcaggctatgctctcccttttatctacaataaaccaccatacctaggagcagtcatgtcctaccttttttacttctttttcactcaatttgcccttgtaaggaacaaagctgtttaaaagaaactcaggagaaaaagaattggtcttgacaggttcaagaattaaaatgtattcatttttttctataggaccttttgtagcccaggctaactctgaattcctgaatgtcctgcctcagtctctgaaaaattgagattaaaaatatgaataaccacaccagattgttttttatagtaagaagtgtttactccgaattgttcccttttcaatgacaattgactgatatattccacatttttgaacatcttctatgtgtcagtcagtgagtggtattatttgtggatatttattgtgttaaaaacaaaaaggagaactgagcacacaaccttactcctgggatcatgatacttgtaatactgaggtcagaggtttaccttgaatttgaggccagatagacacaaggtgagtcctatattaaaaaccagtcaagcaagaccattagtctattaatgtaactccagcatccaggatcgacaggcagaggtaggcgaagttcatggccagccttgtctatgtagcagccagggctacatagtgaggtgctgtttcaaaacaaagaaaaaaaaacaagaaaaacaaaataaaaacaaacaacaaatccaatcaacaaaccagccaactgtacacacacatacacacacacacacacacacacacacacacacacacacacacacacacacacacgccaggaaaaaaggaaaagtataccatgatagagcacagaacagtaggatgaaaacagacctataagtagtatgtgtgtggtggtttaagtaagaatacctgccatggctcatatgtttgaattcttagtccccagctgatgaactgtgtgggaacgattaggagttaagtcttgttggaggaagtgtgtcatcagggctttaagggttcaaaagcccatgccaggctcaatctctcaatctctctctctctccttctctccttctctctctctctctctctctctctctctctctctctctctgtttttgaaaccagaacattttatttttatgactgactgaaatcctcaagatgaactgatgcccgtggagtggatcatgatgtaaataaagttctctcacgactgtctgcttctcaccaagataataatgcactaaccctctgaaactaagcatgccctcaactaaacattttcttttgtaagttgccttggttatgatatctatttacaccaacagaacagtaactaaaacaatgtgtatctcaccatgtagtttagatagcttcctaaagagtaggcctgttccatgtagtaagagataaatgcaccttcagaaatgcattgcttttactgtcatcattagataataaaacaacatatgtatcattttcttgaaagttggtggatcttccatttattaataatgattattataactagtgtatatgtgtaggtgcatgcaggacatggcagtcttgtagaagtcagaggacaactttcatgagtcagtttttcctgtcatcacgtggtcagaaagcacctttatacactggataatcttgttagcctgaattggtatatcttaatgaaaacacgcatgtgttacaatatatctttccgccaaaagccactgagccccactgccacgtgtgagctttacaccagccgcccacctgagttagggcccaaatgaatacacagaaatttgtattaggttcaaagctgcttggccaatgactaggacttctcatctgctagctcagtcttaattatcataaatctatatatgttataagacttatgggacaccttattggcgtccctccttgccggtggctcacatcctgccgttggaggaggcaaatgggaaaaagggacactccctgtttctctttctttaaatatgagtctccttgctatgtcacttcctgcctggatcacaacttctctactacatttcccagaatcatctttgactcctagtcctgcctaacttgccgtttcattggccaagcagaactttattaaataatcaataagataaacatatacagaagtacttcccccatcacccaagcttttaaaatattgccaattcatatctatttatcttttttaaaaaatacagagtctcatctaagtagtccattctgcccttgagctcatgggctctatttctcaaatgttgggattacaggtgtgtgccaccaagcctgaccttttaatttctgattttctgatattcctttttaaatcattttttgaagtgtgtgtgtgtgtgtagtgatctgtaggccagaggttggagttacaggtgattatgagttgcctggcacaggtgccagggacctgtccttaaaaaagtagtacatgcatttaccctctgatccacctcgccagccccgctcttatttatttatctttaatttattttcttaaacaatatatcctgattacacttttcctctcccgctgctcttctgagttcgtcagtacctcatctcccctctagatagactccctttctctcattagaaaaaaataggcttttaagagaaaacaagcaaataaaaaaaagtaaaatgtaataagataaagtaaaaactagcacatcagaattgggaaaaagcaaaatctaaaataagcaagcaaacaaacaagaaaacagaaggacaggagacctaaagaggagaggagaaacagagacccgttcattggcacactcaggaatcccacagaaacagtaaactggaaaccacaatacatatgcagggaacatggtgcagatccatgtcggccccatgcttgtttcttccatctctgtgagcccatataagccctccttagttgattcagtgggctaggttctcccggtgtccttcatcccccttgtcttctacaatctttcatctccctcttccacagggttcccctgttctgagtggaaggacccaaagagacctttgatttagactttctctccacataatgtctggctgtgggtttctgcatctgttcccatctgctgctggaggatgtctctctgatgatgactggatggataaggcactgatctatgagtacagcaggatgtcattaggaatcattttattgatttttttgaccaattgtgtttggttttaccctagggcctggactatctagcgtttggttcttggttatccaagctgtggcaggtataggtttcttctcatggagtgggccttaatcagacattggttggctactcctacaagctctatgccatcattgcccttgcatattttacagtcaggacagattgtaaatcaaaggttttgtggatggattggtgtccaccattctcttttagtagcctgcaaaatacctttccacaacaaagagactagtaggtagggatgaagggtccatgtaggtaccaaatcaacttctacatgttaaatgagttgtgtggatgttgttctcagcaatggggcctcactgtcagtttgtggagagcaaccctttgtcttagcatcaggttgggttatttggggatttccatgggacctccttacaacccagtgcatccactagaagccttgcctggctacatgagatggccagttgagactctgtatccaccattactagaagtcctcattaggatcatgctcataaattacaggaagttttctctacactaggtctctacaccatcccctaagtttatcccaattccactagtttctccatcccatacccatatgtggtccctactgctctcatctcctgtccccagtccacccataaaatctgtcctatctccccatcccaggaagatccttaggatcctcctctttacctaacctctctgagtccacagattatggcttggttatcatttatttaatggttaatatccacttataagtgaatacatactataattgtcttttgaggtctgggttacctcactcaggatgactttttttctggcttcatccatttgcctgcaagtttcatgatgtcatttttaaaacagctcagtaatagtctgctgtgtaaacatagcacattttctttatcaattctttgcttgagggacatctaggttgtttacaatttctggctattatgaaaagagtaacaatgaacaagattgagtcagtgtccttatggtagaatggggcatccattgggtgtatgcccaagagtggtataactgggtcttgaggtagatgattcccaattttctgagaacccaccatattgatttctatagtgttgtacaagtttgtactcccaccagcagtggaggagtgttccctttggcccacatccttgctagcataagctgtcacttgcggttttgatattagccattctgacagttataagatggaaacttaaagaagttttgatttgcaattacccgatggctaaggatattgaacatttaagtgtttttcagatatctgagattcctattctctattaagaattctgtttatatctgctccccctttaaattagattatttggtttcttgatatctagtttcttgaggtttttaaaatacattttgactgttagtctctattgtatgtggagttggtaaaaatcctttcccattatgtaggcttctgttttgtctgactcacagagtcctttgttttcctgaaggttttcagtttcatgaggtcccatttattaattgttgatcttaatgcctgtgctattggtgatctgtttagaaagttgtctcctgtcccaatgtgttcaaggccattctcctctttctcttctagcaggttcagtgtgtctggttttatgttgaggtctttgatccactcagacttgaggtttttgcaggctaaaaatatagatctatttgcattcttctacatccagttttatcagcacaatttgttggagatactcattttttctagtatgtttttctggctttaaaatcaagctgccacaggtatgtggatttatgtctgggtcttcaattcaatttcattccttaacatgtgtggttttatgccaattccacagggttttcattattatagctctgtagtacaacttgaaatggtgaatggtgagacctcctgcagttctttgattgttctggattgttttagttactcttgagtgttttgtttttccataagaagttgataattgtcctgtcaagaactgtaaagaattgtgttggaattttgatggggactgcatttgtagattgcttttggtaagatggccatttttattgtattaattctactgatccatgagcatgggagatctttccatcttctgatatgttttccattttttaaatgtaagcacatactgctacgatttttttcctgttagcactgctttccttgagtcctttagttttgggtatgctgtgtattcattttcattgaattctagaaagtttttaatttctttatttctgtctcgaaccattttttatccaatagtgagttcttcagtttccatgagtttatatgttttctgtcagttttgttgttgttgatatacaacttttatctgtcatggtatgataggctgcagggtactattttaatgtttttgtatctgctgagtcttgctttgtatacaggtatgtggtcacttttggagaaagttccatgaggtacagagaaaaaagtatgtccttttatgtttgggtgaaatgttctagaaatatcttttaagtccatttggtctataacatctcttagctccagtatttctctgttggctttttctggatgacctgtccattggtgaaaatgagataatgaagaaacccactatcactgtgtgagggttaatatttccttccttatctcttttgatttgttttactggaagtctattttgttatattttaaaatggctatgcttgcttgtttcttttgtacatttgcttggaatatcttttctaagcttttaccatgaggtaatatctatccttgatgttgaggtgtgtttttttataaacaccagaaggatggatcctgtttttgcaaccattgtgtttggctgtgcctttttattgagaaatttagaccactgatcttaaaaactatcagtgactaatgattgtggattcctgttatcttgttagtgtttgtatgtgtgtttctgtttgtacttcccttctttttatttttctggtctgtgatttttaatttcttttgttttcatggatgtagttaacctctttagattgaagttttccttctagcacattctttagggctgaatttatagatagatgttgtttaaatttggctccatcatcaaccatctcattttctccatctatggtgaatgaaagttttattgtctacagtattgtgggcaggcacctatgatctctaagactctgcagcaaatctctctaggcttttcttgcctttagagtctccattgagaagtcaagtttaattctactaggtctgccttacatgttacttggtcttttttccttgcagcttgtaatatccattccctattctgtgtgtttagtattttgattattatatggaaagaagactttcttttctggtttggtctatttgatgttctgtatccttcttgtacctttataggaatgtccttctttaggttagtaaaattttcttctgtgattttgttgaaaatattttggggtctttaaactggaattcttctccttccagtattcctattattcttagctttgatcttttcatagcatcccagatttcctgggctaggaggggatggactgtaggattcacaggagatgtggggggggcaagactgcgactggtgttctgtcacagtgctggtgatgagactagggaattggatttggagggaagcagtgagtcgtgagggtcttcagttagctcacctgtttccctgttctgcttagctggtgtgttcccagtgaatgcttgttggatttggaagctgggatactggaatgagttgggaaaaggaaggttgagggagatcttcctgatctgttggggactggagtcagacagcaaagggagagaccacagcatgtttcctgctacagttctggggatgagactggggagactggctctcagaaactataagagaggtgtctatctttaattttttaaaaaataatattttgtattattttttcttttcctcttcaaatcaaattcgtgttgtccagccactttttaaatactcttatgataatacttacaatggctatgtccccaatgtatccccagtaagacattagcttttgctttacatttcaaaaatctgattttatttcttagaatagtttcaggttcacagaaaaattgagagaaacacagttcttatttaccatccctcagacccccacaggtatattattggtaattcaatcattagtgttctattctagacctgtgcatttattacaatcaaggaaccaacaatgaggtatcattataacacaaagtctggattttacactagagtttactcttgttggtgtattctgtggatttggacaaatgtatgatgacatagacctacaagtagagcactatacaaaactctcccaactctaaatgacctctaggcttcatcctagtcatccctccctgcttctactgatccttatactgtcttcataggttttcacttttcagaatgtcttaaagttagacccatactattttcactttacaatatacatttaagaatatctccctctccttctccctctcccctccccctccccctccctctcctccctctccctctccctctcccccctcccctctctctccctctctctccctctctttctctcctcttttgtccataccgtttgtttttctctttctggagtagattaaagttagtgcatcctatcttgcaagttaggcaagcaccctacaattaaactacacaagcttttattactttgagtttataattccttaacactgaacatattttcatatgcttatttgacctctggatatttttttttgttaggtgtctattcagacttttggccccccctttttttttttggtttttcgagaaagagtttctctgtatagctttggagcctatcctggcaattgctctggagaccaggctggcctcgaactcacagagatctgcctgcctctgcctcctgagtgctgggattaaaggcatgtgccaccaatgcctggctcttttggcccatttttaattgggttgtttgtcttactgttgagtttcaagtggtcttatgatgtgttagatgacactcttttttatttgaagggttttgtttgtttaatatatctgaaaagaattcatatacaaagaactgggacacaagaaagcattggctcagcactgacaaatccacaagattaggactggggaaggagattacccaaacatttcttaaaattggaacctgcaaacaaaataatcttgatatatctctatcaacactcatgaagagttttgaggctcttgccatttttcttgaatgtgaaagctttagccagttgctcaagggttcctcataggcatgaaagaaaaaaaggggatagccctgactggtacccatgttggttaagtatgctccccatcccacatgctcctagcttcttaatgaagccggcctgtaacctcaccacctgaaaggagatggaagtcatcataaccatttgtcttctagcaccatcccttaaggaaccctgtgtaccaggtcttcagctgaatcaaggaacactacagtcagttgtacatctatgctaagcatataaggaaatgactgacaggggcaaaagaacgtcatttttttttattaggaactcaatccatttggtgtatttcaaaaggtgcagtacttttttcatttatcagtgaaagaagttagaaattatcccccctccccaaatcagcaaaagacaaacaaataccttgaaagtcaaagtcacatacagagtacatcctagaaagaggggcaagacagtttccatccaactttatgagtttcatcaaagactgagtccactcaagggtggactgaaaaggcatctttcaagaagaagtatgttattaaatgaggcgtttctacactccttcttaagagcaccaggtggggactcatttgctaaactagacctggggaatagagtgtagatataatctgtccttctgctaagggctgtccactggttaacaatttttaaaaaacaagaataagaaacaaccccacacacctcaaaaggagagaagggctgagggtggggggattctaagatgccccagattgctctccaaaatggaaccagggagcatctttgacaattcaaattagtctgttacaaaggatgacactctttttaacagaaatgtgttgtataaatattttcatctagtctgtaccctgtcttattcacttgacaatttccatcacagatcaaaaattaattaattaacaaattaactgaataattaatgatgatgatctattgctatgtagccagcccaggcagaccactaactcaccaccctcatatcccagccttatgactactcagattacaagcatgtactaccaaacctggcaggagttcttattttgaagatggtacatctaatcaattctctaatacatcacacctttggtatcttatccaaagagccattacttcaatatcatctacatttttctcttgtgtaaccttctagaagttctatagctttacagttcaaaataaggcctgtggtccatttgggagtaattcttgtgaaggatattagatctgtctacagatttattcatttgttcatggatacctagctgttgaaaagctgtcatttactgaaaagacaaccatcaagaagagtgtattgtattgtattgtattgtattgtattgccttttctgtttgtcaaagttcagacgtggatgtttgtgtaggtttgtttttatgctccctagtctgctcttgtctgtttagtttttcacaaatatgttattattgtctcagttactgcatcattagagttaaatgatgtcagctttcagattttgttcttctctaccaatatggtattggctgttctgagtcttctgcctctccttataatctttagaattggtgtgatattgatctaaaacgtaatgtgttgaagtttgctttgatttaaaactttcagttatgacattgagcctgagaaatacaatagataatagtggtattgtgttagccagctctgtcacaatggcaaaattcttgagaaaaagaatttaaaggaaaagaggcttgttgcagagattgcagtctatgaccagctggctggcttgatttattttatgtctttatcaaagaatagccaccatggtagaagggcatggctaagaagctgcttacctcactatagctaggaaggaggaaaagtgaaagagaggaagagaaggggagaaggagagggaagaaagagggaggaaagagatgtgggaaggaggataagtgaaagaaagaggagagagagaaaaggagaggagataggtgtatggatgcatggatggatagatagatacatacaggattattatggatatagagtgaaagggatgcctcctgcaacctacttcctctaaccaggttttacctcttaagttttccactaccctctattctttataactacctcccaacagtgctgccagctagggatcaagtattcataaacatcaacctctatgggatattcaaatccaactccaataggtacatcaaagcatctcttttaattagtataattttgtttaatctgtataatcaaagaccctcaccattgtgttccattttctatataaacaagaacatctgcagacatgttttgcagcaaatggttatattcaccagagagactaaaataaaataattataaaggctttcaaaattgttgggtaggttgtgaaacagctggaattttcatatattgctggtggaactataagttgctagaatcactttggaaaactacttgtccattttgattaaatgtaattatgtgcttaattatgatcaagatatcccaaacctgacaaatgtatacatatattcatcaagaaatgtttatcaggatttttgtagcaacagaaaataaaaacaaaatgttaatcataagaagaatggatgcttcattgccagtgaaattaacaaactagtacaaaaggtaccaacatggatcagtctcaccaagataatattgagagagagctcacacatatataagacaatattctacttcattacatttatatacatttcaaagatgaaaaactcatttctgacaatcgtgattgcccttgtacataagaatgtaaatgagtgggaaaaggaatacataagaacagcttttttaactttaagttctatttcttgaggtggatgatgaggtgcacagatccatttgctgtaaagtaacctaagtgtggttgtaaattatatacttttgggggaatgtagttgtaatgtgtcaatgttaatacttaccagtgaagtttttaagcaacctgacttggcctgataagttctataagagatatgagagcatccatggtgaggaatttacattttaaaagctttcactttttgagtatcgggaatcacaattggacagttgggtaatctcttgaggtagagattgtcttagtaatgaggtaggactggggtttcggtgtgggatactgcagcccttgctcttccctactatcactatctttcattacgattagacattctttcctttatctacttgtgcttatgctaagcagccacagttctgtttccttttcttatttgatattttgccacacagagacaatggaatgctaaatatattcacaatgtgaaaataaagttgaaggacatatatttattttaagcaagggcagatgactgtccattaacttatttctttttttgtggtgtgtgtgttgctgttattgttcttgtcacaatgcttgtgtgtgtatgttgtagtatcatgaatactttttcatttgttttagaacactttgaatacttttctaagtatttgagcaaagcaaaacattgagtagacaatctcattacttgtggtgggcacttagaggtctttcccccttaagaggtactaaatcagaatcttactggggccacaaccattcaatattttcctatgtgcattgacttatacacagaaatattcaattgtacctgtcatttttcatctgttgttcagtgataacatttgctcagtttcccaggagtgttttataattctccttacattctgactaactctaatatccattcctcttcaggttcttattaaattgacaaaatgaggacactacgactcatacatgggactcttgaacctccttattaacctttaatacaacactgaaaattggtcatttattcttcttattagatttctaccacttaaattctttataaactgtagctaaagtgacacattgtggtggtttgaataggtacggcccccatagactcatgtatttgaatgcttggcctatagagagtgacattattaggaggtgtggccttgttggagtaggtgtggccttattgggggagatgtgtattatgataaagcaggaggggaaccttggccgattccatgttgggcaaggttgatcaaggcagagggacaaacatgccaggcaaaaagagcttagtgagaagttttattaggaaggggagggacgggggaagggaagggaaaagaggtaaagagacacagcggcacagagacagagagaggacagaagagaagagagagacaggaagaatcctgtgtgccccaggggaacagcgtgggtggagggaggagaaagagtggagagtagaaagagagttcaagtgggtaggggtctttcttttaaaggggtcctttgcacctgcatgcagactatgcaaccatggaactctgggctcactagagtactgcctgagtgtattctgccaggtgacaggggcaggccagcataatgcctgaatccttactaagtgtcactatggaggtaggctttgaagtctcacatgctcaagctatgaccagtgttatacacagtgtcctgctgctgcctgcagatcaagatacggaattctgggatacccctccaataccaagtcttcctgcatgctgccttgtttccagacatgatgataatggactaaacctctgaaactgtaagccagccccatgtaaatgttttcctttatatgagttgcagtggtcatggtgtctcttcacagcaatagttcatagtgtggttactaactttataagaaagatacaaaggatgtgaagatggtatgattttcataaagaccaagtttctaccctctagagtttagctattctatttacccattgaagattataaatactctctgattgaaaaaaatgatctagtatcccagctctgtccatgtgtgtgctttcattgctatacccaaagcatcttacagatatcccctgccatgatgataatggactgaacctctgaaaccgtaagcaagccccctcaacaaaatgctttctttataagggttaccatggtcatggtatctcatcaaagcaataaaaagactaactgagacaggatctatgcaagaggagtacatgctcttaaccatagagccatctcttcagcctctcagttcattttttttaaatgtagcaataatttagaaacatacacaagaatttagtgtaccttcatttgtgatagaatattccagtttcttcatttcaattctcagagtctatgttgcagagttactaaagaagaaaatataaatttagcagtaatacacatgtatagttataactatattatacatatatagttaggtgagaagaccattaaataatcattattcacattggtaagaatagtggaccctcattcagttcaggcagatacaataaactagcaaggcttcctttgatattgaatctatatactaattatacagtagttaacaagtttaaatttgcttacaattagaaacaatgatatcattcatccactctcaccttcatttctataacctgcatgattcagttgacaaattgtattcagaactatgtagaccagggtggccttgaactcaaagaggtctgcctgcttctgcctccctagtgctgggattaaaagagtgcatcaccatacccaatgaagatttttagattttatttatcttgtatgtacacatgtgtgtatgtgttagggtgtgcattaacgtggaggttagaggacaacttttagaagttatttttctccatccaccatgtgtgttctggggatccatctcaggtcatcagactcggtgactggtgtctttgtcaactgagccatcttagtatcttgaagttttatttttaatttgtctttgaagagagatactcaaagcaatctgttaagataatagtcagttaaaggaagtggaaaacttacaatatcaagacttttatgaaaattaatctgacctgttgctaaagtcaattcctataccccattttttgaaacaaactttcatagggcattataacaaatctgcaatgactgttaaatgaataacatttttgtgccacaacagatacaaaatactctaacttccaaatccccacaaactgctatgatgccatccaataaaaaagactaggtcattgctacaatcaagtcaatttcagcattcctttcccagagctattttgcatattgggtcatacaccagtttcagtcttggagactgtctattttgggagcttccccacaatctggtgacatgatggaaaagagtatggaattataatggtaacatgaataaaaaagacaaacattcagagtttaaatgattatctttgtatagttacttttcatttacaaaggtgcattgtaagcactaatttatccatggaaagtccctgcaaacctagttatgctatgagaaaatcagagtttaggaagagaaaagtgagatttcctagcagagctatatttttccatagctcatctctaagcagaatcctctaaataggtaagtcaattaaattcctcttatctaaatagaaagcctgttcagtagattaagaaagtccattttgctcaaagcccttagggataatgcaaaacattgttccactgtaaaccagaatctcagaattgaaaaatcaagggtgaccagactatttcaagtatttggacattttcaagattagtgatagactaatgtaaagctatgtaacagtgattcaaactagaattggatgtatttataagaaaataaccagctgaattgccagatctaattccttgttggcctataattcatttctgactatgtgagtttcaatgaaaaatgggcctaaggaatgcacgtgggtgtcactgacagtcactgataggcctagggcataaacaagagagaagatcaaatacagtaggagaagttttgtggtagaagatagccaacaaaaattttaagatgcagccataatttctgtcactggcccagaaggcagagagataaatgcattagctgtgatctaggagactaaattacaagaatacatagaaggttttgttggaaattgcaagatgattaccacatataatagataatctattgttggggagctatgccaggagcaaagaaatcacatgtagacagaatatctgacctatacaaaatgtagctcaagcaatatgtcatatccaaccaggtatggttacatatatctataatcccataacttaataggtataggcaaggtggtaaattcaaggtcgtcctcagctacatattgaatgtgaaggccagagttcagatccccagcactaacataaaagttgagtgagcattgaaggccgcctataatcctagcctcaggcaatgaagagagatcattggaacaaggtggctagccatactagctaaattagatagctccaggttcagtgagaggctctgcctgaataaatagagagtgattgaagaagacaccctacatcagcccctctcctccccatgttcacatatgtttactctcacccaaataaacatgcattcacataatggaatattcatatacacatgcacacataccataagcatctacacacaaaaaaagaaaaagggaaagaaaataaattagaataagttgacatgaaatgagaagggatggaagaaaaaggatcctaagagaatgctaaattgttaagtaatgatatattctctagggtctgtgtgctcattaagaagattttggttttaactgaaagtgaggtgagattatgtattgtaaatttttacggcgatggatgactccatctaacatatattaacaaatagttatttgtatatctttaaagaataaaacacacaagtacacatgttcaataagcgaagtagtgaagagaaaactacaatacctcaatagatgtatgatggttctttggacctgggtggtagcatttgaaattgtgagaagtggctatattgaggaaatactgtaaggtatattcagtgaaatttgtttaaaacaataatactttactagggcacaattgctatatgaaaaatgtgtgtgtgtgtatccgcgtgcgcacgtgcgcgagcgagcatgtgtgcgtgccatgtgttagtttttggttgttatgacaaaataccatgaacaagacaacttacaaaagaaagagtttacctgactcatggttccagagagagagtttaatggcagggaggcatgacagcaaggggctggagctggaagttgagtgatcaccatctttaaccacactgaggttcaagaaaccatcatcacaatccattctccaaacatacattcgcctacaaaaatttattctcttgctccataggtgttgtttttgaaaggctgaagtaggaggatcatgagttcaaggccagcctggactaaaaatgtgaaattcctatttcatcacaaaaaacgaaaaagaaaatgtaaaagaaaatccatataaaatctaattatataacagtattattgaatacatttatactcttgaggtcagtatgggtgcaagagaagaaaaataaatacaattctgatgctttgggtctgatcaaataggaagatgaagatgtcatataataaaatgaatgagtcttgacaaatttgaaagactggagcctttgtgaagaatgctacatccttaaccaccagaaaactgcaaattgaaattactgtgagatgttatccgatcccagtcagaatagctatcattaagaaaacaactacaacaaatactgataaggatttatagaaaggagaaagccttttcactgttgatgggtctgtgaatggggtccaggcactatggaaatcattggggctgtttatcaaaaagttaaaagtatatttcttatgttatccagctagtccagtgctgggcatgtatccaaatggctgtacatcctcttacagagatacttgaaattcatgttcactgctgccttatttataagagtcaggaaatggaagcaggctacacgctcatcaagtaatgaagagataatgaaaatgtggtatgttatacaatggaatattattttgtttttcttaatgctgcatgttctgtctcatatatgcattctagctttgaattcttagactgctgcgtttaatctggagtgcctagagcagtcaggaacccagaaagaggccccttggggaggagggataatagaacactagtgacatgaaagtagacatagggaatacatagaaactataagcaggaaggaggaaaggacctggggcaaaggggcaggtgagggaaagggttaaccaaaaccaagtgtacatgaaaaatctgatagaaacttactatttcataaatctagtgaaatcataattttaaaatgttaggagaccctgtgtgtgagtgggtaatactcttctaagaagtcaaagattatcaaatgaaaaccccagtaccatgtgtggaaatattctctcatgagttattggtcagagaggttgaagaagcccctcaagcattacagactattgacattgctcaccagaactagattgtaagccccagttactgaagataccacacacttgtgttgcaggacactgagtaatcaaattgtgaatgagatagacattttctcccaggttgccacctttcatgaccctggaaggtgctatgcaggctgtgggagaaaagttatcaacagacttatccagctatgtgccccacaagatacaataacgacacaccagacataccactagtgcaatagtggcatgattgttatggaggccatcaatccatttattcttacatttgaggatggcttgaaaggaagaaactcatacctgggactgtaaacctaggcaagaacctgcatctggagtgcgcaatatacccaaggaatctactactgttattttactaaatgtacacagtgccttctcatgctcaggtttttctattagtgcggcttactctcagacttcatcagcgaacctcatttggagagcagccagtggtcactggagaggctcataactggtcaaagtgcagagaataagaggctgtggaatgctcggctctaaatgagtcacctgtatcaccctctccaggcctcgggaacattatagaagagaaggtagaaagaatgaaagagccagagaatggggaggagtatcaccaaagagtcttttggatatcaaatggccactgtactcataaacttactgcagttgcaaaagacttgcacagaattgggccagtcaccattttgtcatgcataggggagggactcatgaggccctatccatcactgagggactataggcagttaatggttgttgggggaggggtgccatttcctttagcaactgataatataatgtgcccatacttcagtaactagtactccactcatgctcacacaagcaaccacaattaaactcaatgggttaaaaaaaatccaagtagaaaggggcttgctaggaggaggtgtttcattgggaattaagagagcacactgaaggtgaaaatgaacaaaataaataacatgcagttatgaaatttctaaagaataaaaaatatgttgaagattttagcatgcttttagattaagtgttttgtccttggaattggttggaaattactgtttgtttctttgatgggttttatgttttcctgaattatgaatcacttaactctattgttacgtttgttgccctgtgcatttgaaaacttgcattataaaatgttacatgctaattttagaaaatatgaataattgtaaaattgattatcaagttagcaaaggttttagaaaatatttatttttcattattatgtgtgtatgtaagtgccatgtatgtaccacagtgtgagtatggagttgaaaggagaactttgtggagtcaattctatctttatgtgggttctgggaattgaactctggtcatcaggcttgtatggtaattaccatacctgttgagctatcttgctggcctcctctgctaagttttagatactgatttttgctatctttcttttatttaatatctgagaattgaccagaatgcagtacatagaatactgagaatatagacctaagaattaagagattctttttactatagattatttaagcacaataaataaattcagttagtgatttaattttataatgaaaatgaattggatattttggaacttgtcttcttaagctgacagatattattaaactttaacaatgaaatgtcctagcatcaaactgccttctgaaaatgtgcctctttacccttaggtttgaggtgggataatggtcttgtttactatacagatttgtcactcgtattggtttaataaaacattaattggccagtggccagggaggaaatacaggcagggctaccagactaggagaattctgggaagaggaaaagcagagatgattcaccagccagatgcagaggaagcaagatgagaatgctgtactaagaaaatgtaccaagccatgtggctaagcaaagataagaattaatggtttctttaacttttaagagtttgttagtaataagcctgagtgataagcccaacagtttataattaatataagtctctgtgtgtttatgtgggcctgaacagctgcaggactgggtgggacagaaaacttgcatcaagtcctcatcagggaagcatctttattcagtggatggtggattacacagagattcacaactggagaaagtgtagagtgtagagtgctttccacatctcatccataaaggttcatgggacactgtagaactgggaggggacatgtaagagccagaggttgagaagtagacagtgtcttctggaaatgacaggactgttatgctcctgaattttgggcagctgtggttgtctacatgggccccactaattggactcagtagatcacactgataaataaataagtaaataaataaataacacatgggagttgggatgaggatatgaggaagagagatcccagaggagaaagctatatgcttcctgagttttagatcctaaggagactattgctgttttcatccccttaaaaatttatataatctcaccaggcatggtggtgtacactgttagctccagcacttggggaggtgggggcaagcagatctatatgagttagagcccagcctggtctacagagtgagttacaagacagccagggactcacagagaaacctttcttgaaaaacaaaaaccaaacaaacaataaaaaaggtactgtaaaatttgtataatctcactattgttataatcaagtcaagaacagtatttaaagacatttgtatctttataggcaaaactctacttctaccaatttctctgaggctatattaatgcacaaattttacatactagactaaatctcctggttttgttataatgacaaaaataagccaagaaaaatatacatacttaaatctagatatataataagttacataccatgtggccaactcaaagaatatttttgaagtaaattcactagcatagaaaaatgtacctaacattttgactaaaaaaaaacgtaaattataggatggatggctcagggcataaaagtacttgctgccaagtccagtgactcacaagatggaaggacaaacctgactctcctaagttatccctggatttccacattcacattgtggcatgcacatgcccacacacaccacacatgcacagaaacacagacaactacacatatacattaaataaataaatgtaataaaatataaaagtaatgaaaacataaggtgataagacagttttataaaggtgaccctacttggaggctagggggtggcattatctataagcagaacgtttctttaggtatatatactacaaaatagtcactgtttatcactagtagaattatggacatttttgtttactctgaatttctgaaagaaatacatattattttacaatacaaatgtgtaaatcggcagcaacagaggtgacaatagataccagtatttcaagatccttaaaattacacaagtcatattttctatggcggcacacccttattcatgcatcataggaaaaacttctaatagcatgttattactggcactccctgactataccttgattgaggttagtataagccatgagtatccaatttaagggtttaaagcactcacaagaaagtcttcaaatctgagaaatgtagctaaacacactcatgttctaagattaatttcaatttttttttaccgattacagtagtaattaaacggataagtactaaatattcccggagattcaaatgctgtaaaaaaagaaaccagggagaaaactctcaatagaaacacgagaaagctagcatctttaattttttctattaaagactcactttttttctccatatggtaagccaaaagtctgtatattcatccaagtacagattattcaatgtcgcaaatgatataagaaacaaagataaattaaatctaccgataattgagaaacatgatttttcatgatagttttaaccacctcttggacagagtcctttggtgaagctcgtatgagaaacataattgaattgtgtgacctcatctgatttcaggtatcctttacaggtgctaatgaacagtgaaatggtcaagaggctgtcggccaaaggaagcagttggagaaaaagcacaacacgggtaattgagaaactagctatttagcttcaaaaacatagagttggctacactgacaattatctattgagtaccttttcaacttaattccatgaggatgtgttgtgaaaccattctatcacattaagagtttagttgagcatggtggatcatagcctggaacctcagcacctgaaaaacagaggcaggagaatcaaggccatcctaggctacatagtgagaatcaaggccaccctaggctacatagtgaattcgaggccaacctgggtgcataagaccctgtctcaaaagaaaaaaaaagctgaaataaaccaacaaaaagaggtttcatatatgcatattctagcttggttaacatgaattgtgccacaatcttagcaattctctataccatagtgcttttcattggcagtaatgataggctgtttattgttggagtgcagacaatcaatggcaggctcttcagctaaatatggccaacaggctgcttatgagtcaggactctggcagacatccctgctttcagaccaatgggaatgttattgactcactcctgtgtctttctgggagagagtataagcattgctggcatccaaatcattttttttattattgttccaaattcatgttctagtaaacagcttttgaaagcattgttatggtgaacattttgtggtttatgctaagcatttggttttcaagaattgttgaaaataaatgtttgtagagtgcaattattttcaagtattacacaataaactctaatatttgaaactaaaacagtatctatgtttgattagtaattaagctctcaaatggttatgaaagtaattttcttttataaggaagtactttaggacaaattgctttctacacttactaatattgagaactttaactatatctacatataattattattgtagctttctatagtggtagtgaatgctatttccatttacggcagtagtttaaaacaaagtacactggaaactatctgatatttgtaaataaaactgtatcttcacatgaatattaattatgttttctacagaaattgtgagagtaatctccatttgtagcagtcattttgagtatataagattcttcattttaatattaactgctacttcttctatgggagtatgtccctgtgtacattttattaacaaaaaggaaaatgaaatagctgtagatatataaattattcatactacttgaataatctagactagtccctaacttttgcttaaaaataaagacataaagtcatttttagtttagttacaggtaatagtcaccaaattctacttaattgaaaaacaaaagtctcctagtttctgttttagtgagaacctgaataaaagtatagacccatttaatctagttttttgagctacaatggcatgatctgatgaattgtaaaatgtattcatactgagcacatgctgtgtatatgacctgatagtattttatatttattgactcatatttataaaaacccataagggacatatctcttaaatttattaaagagatttgggcagttttcctaccactcaaatgattgaactcatatttaaaaccaagtacttaacctctagagtcaatctttgtagttccctgtgctctataacatcactcaagtttctgctacccaaattatttctggcaagtatgattctttttaggcagtccatgatcatcttccaaatttcatttgtgttcctttgtcaagggtaccttacattcatatgggtccagcaaattctatttagtgtactgactttgagttacttcgaatgtatttatcaacttgatttctccctcaattaatctttactggtttattacttttaaccttccctgtttgatgtcccattgacaaggccctctcttaaacacataacacaaattctaagcaacaaattataatacactgcatttgcaagacactgcaatttagaaatctcttctatatgcttcctctcattttaagcttccttgttaatttttggttataaaggttactgaaatgtagtggtagtccaagagtgagaggctaggttgtggtaatattctgaattcaatcatgtccacgtatattcggatgccaatagagcagacccatgggggttttatttctgggaggacttgatctgagcgataaaaactggatcattgacattgatgtgtgttcagcactaaatcttataaatacaggagttaagcaatgtgatctcagttagaagattgctaactgacatggaagttaagatcttctatctaagatggaataaatctgtcaaaaggtgggttaagacaggagatccaggaaatacctttatgtgctaaaatgcagaagtaacaaccttttcttatatatctgtgcttccgtctctgggtaagaaaagagttacttatctttaatttgtttaaacacagtcacattgagtacttcaggttggcaccagacttgttatgaagctgaggctagcctctaacttaccatatgactgcttttgcttgcctagctatgatactgccaatgtatgtcacccaagctctacaaatggaaaggagtacgtagagcaccaggcctgctgatgcattcagtcattctcgttttactccccaattatttggccaagtaattttagacatcttgtattctaacacatatagcttcaagaagtgttatatctaagtctataatatacttttggagactgttattgttgttctgtgccaaacttcccttcaactactggggcataggctcatggaagaagaaaattctgataccaagttaagaggtggcccacccaaacgtgctgcttcttggagatactaaaaaacatagcccaaaacaaatggatgaatgaatatatgtatgacagtcacatacaaaatgaaaattggtatataagaaaaaagataagggagcaaaataagcatatatcaatttagaaacattaaagcaatgatattttagccatgacctatatgaactaaaagtaacaaaagtcattaaacacataatgatgatgatgatgctaaaaattaaggcatgcaataacaattagttaaaaaaagaggccatgaatttaaagaaactgggaagggtatatgggagggtttagagggagaaaatggaggaaaaggaaagaagggagaaatattgtaataatattataatctcataaataaaataaaagactcaaaagagactgaaaaagggatagaaatggaataataaaagcttcacatatcctgacatctaagcagactgcaatatggaaatacgaataaaagcatattcttgtactatactatgtaatagcaagaggttagaaaacaaaatgttcacctagacatttgtgatcatctatattatggtaattcatacagcagagcatcacaaagccctttaaattatgtggaagctctctagctaatggtattatacaaggttgactttgctataccctcagacaaaattttgcaatatgtttagtatagttttaatattgcaaaacctaagctacttatagtgtatgtatgtacagattatttgtgtaaatgcaaagggaaatggttgctaaaagttattacttagggaaatgataacaatgttgattttttaaatgaatttttgtgtgtggggtagggtctcatttatcccaggttggccttgaacttgttttgtagataaggatgaccttgttcttcttgtttctacctgacacatactgggattacaggcatgtgtgcttgactttttttctctatatagcttttcattttgtctgcttccattttatttttctacatctagaaaatgcactgcaaattctaattggtcttaataataaaaacctggagtcagatatcacggtaaatactgaaaggtcagagaagtaaaggagccagccactagagagaattcttacctctgcagaatcctcagaccaaagagtttgacatcctgtttctagcaatcctcacactgaatgaatgagagatcctgtttccactagccctatattcctatctctgcctccctagtgcaaggagtaaagtcatgagatcccaagtgctgagatcaaaggtgtgtgccatcactgcctggcctctatggttagctagtggttagttctaccctctgatctttaggcaagctttatttgttagaacacaaacaaaatatcaccacaagaaaacaaatgtgaagaaaaaataatcaacaacttgggaagagaagtgtataagttacttttctcactgttgtggccaactatctgacaagaagcaagttagcaggatttccttttgcttatacttcaaggggatacagtccatagtggttggaaggtatgttggcaggagcctggggcagctgcttatattgcattgcagtcaggagggaaacagagagagaaagagagagacagacagacagagaaagagagagaggttggtgctctttgttttcttcttattgttcagtctaggactccagcacatgaaatagtgttgcccacattaagagtgggtctttcctctttagttaaactttctggaaatagtatcctagcacatctagatatgtcagaagtgtgtttccatggtgattctaaatccaatgacactgacaatgaagaataatcatcacaagcactaaccataggtaaaattgagatgaatatcaaagaatttatctcaagaaactctattggcctttgaatgtttacagagatattcacctataatgtagtctacttagcatcattaaaatgattatagtaatctcaaatggatttagtgtaggggttgttttcaggacagggttcatgtgtgtgtattatggctatatccaacatctgaacttccttttcttggttaaggaattcacctatgatgtgagttaaagtggaaaatcacctctagtcctagaatatatgtttttgaactaaacctattgaagtctcctacatgcaagttggactcaaagaatgatagggccaggtatatttctttcttaggaaagtgtactgaactataatactaggttgctagcagtgccaattgctaaagagactgcccaatggcataatgtacatctagggctcccatactggtccttatcctctggtgattccttacattcacactgatcttaggtttaagatatttctgtgaggtctgtgaaacacctagtcttttcccccagaaattcactatttgttcctattaactacaatcagcttctgctatttgaaattaagagcttttgctatgtacctacttagtatgtttttatagttaccataatgttggtccaaaaatgtgagcaaggaataacaaattatcccataagtatagaagaagaagaattatataaaccactagtagattaaagttggcatcacatagaaattatctatcataattacatagtcttatttcaagaatatagagatatttttatctaaggaaaacacttatatgtaacatcaatagatgaaataaattagtatctccatagatgccttaggtaaagaaagtttcagacccattttcccaattctaaaattgttaataattaaatacctacttacatgccatatcctgcactagactctaatttatgcagataagacacaatcacttacctcacagagcctatgaaaacaaaaacactaatttacttcttagaggccaatgataacaaagaaaagtgatatattggtggtttttaatatttggtagaggtatacattggaaagttacaatgtggtcagaataatcttcagaaaagtcttctttaaaaactctctctgatgcattgtgtagcataatcatattttaaaatgatatgttttattctttgagaatttcatacagtgtattctcccttgttaattccttcattatctatctttttatccattcccccatcacgtacagtttctgttgcctaactgctcttggaaatggtgtctgtcttgaatctggttgacctatctgggggtcatatcatttaagaaaggcctcttgagtgggtgattttttttaccatgccctgagaggtttgtctcagaaaagagcaaggctaactcattccttggccctaaataggaagagaggaaaatagatgaagatgaaagggcattatatgtgatgtggaaaggcaggatagcagattgaagcatctagaaattgcctttttgatgtgattccctttccatagctaccatcatcatctatgccactatcatctcagacagacattcctgaagtagtagctgcctcactcttcttactgtttgtcattttttcgttctgtaattcattgtaagaattgtctaaaaagtaaaatctcagaacataaatgaaatcatgctgctccacacctaaaaaccttcattggttctctgttactcttcgaataaattaaggtctttgaaggcagctctgctcaccactataccaccaatgcaacatatgagatcttggataactaggcatctatctaccttcctcttcattctcacccgtagaagtttgcttattctccactaagctagcaggctcttcattttgtccatgtacatgtaaaattctttggtactttgggttactatatatcaataaccaaaagattaacaactagaacaaatacgtgaaaaggatgcaaacagataagccatgggagaaagaaaaaaattgttcctgttgatatgtccatttctccaatgtgttagttacaaatgtagagtataaaacagatattttagcctattagtttcacaaatactgactaaaacatttaatacccagaactgttgttctcatattatagttatcaatgtgtgcaaactagtaaacatttctggaaggtaatttaatattagcctttaaatttaattactatgtaccaattcagccagaaaaagccaactcaaggtgtttttattacattgcttacaataataagagattccttaactgtacagtggtaatatatacagtgcaatgacgtggtgatgccatgaaccatttatgcatgtagaggattgtaagaatatgaccttgaacttcatctttgtgacttctaaactttttgatcacatctctcagagtattgtgtgtgctttggaagtaaactgccatagttatggcagaaattgaaaggaacatgtgtaggggtcagttttcttctttcataatgtaagttctgggcatagagttcaggttgtcagcctgggaaactacctaatgaaatgttttactggccaaagtcccaggctttgtaaatactgtaaattctagcattccatacataaaattttcaaaatcttttatctggaaaaataattattatacatgttaaaaactcataaaacaacatggcctataagtgtagagaaaaacagatggtgaaatgaaagatgatataatttgtaagcaaggacactacatacgcttatggacataaacaaacaaatcatgagcttagtgaaaaaggaatggcagatgcaaaagcattccaaatggaaatgatagtgatgaaaatgtatcaatgtacctctgatgaaatttactttttatgagcttgacagtgttagacatggcaaaagaaagcagcagtggacttgaacacactgtaatgactgttgaagacaacattggagtgaaaaataatattcagagaaacctcaagtgacaatattgagcattctaatgtattttcagtaggagtcttagaagactaaatgtagaggaaaaatatttgaagaaataatggccatattttttctaactttgatgaaactataaaagcagatgtatatccaagaaacaacagaaagcaggataaataagttgtcatttgtttcttttagtattccccaaatgctggcatgtcaatgagctttttaaaaattatatttattatatttatttttatgttatatgcgtggatgttttgcaggcatatatgtctgcaccatgtgcattcagtacatgtagataccagaagagggtttaggatagcagaatcccttgggaatggaatttcaggtgattgtgagcttccatgtagttgctgggaactgaatccaagtcctctataagaacaatagataacttaaccactgagacatctctccaaccttgccaactggcttttgttttgagtccttagtttaaatttaaatttctgctgccttaatttgcctttctcattccctaagactgactgtggtctagacaaaatgaatactaatgtccctgttggaaaaggaagagatggaaatcaataaatcaaaatttacagatcttgaaactgctctcaggtaggagaacatgtccatgtcaacatatgttcttgaactttgtacttgacattgggcagttggaagatagggatgactttgtgttgtttggtttcctttatatgcttcctggtactactactttaatcctattgagcttttctgaatcacagcatttatgtttattccccaagtgctgtgttttgtatcttgtacataacacaatcactaaatgtatgtcaactaagagattagactatgatcttcaaattctagcatgtacgagaatcatccagaaagatgataacttacagattgctgagccctatccccagagtccatgattaattaaacctgagatgaagcctgatgacgtccatagagaacaggttcttacctgtctcatctaactatttcttcccccagaaggttaatatctcttcttcctaacatgcctttcatattatttttatatatcttaatggggatcaagaaaaggaaataataatttgcttggaaacatgtagtcctacttatagttatgacttagctttggatgggagtagagtaaataactcataccacttataatttgtaagttatttatatactgtgctcatattaattactggattgtttcgcatggcagaagccaattttgaagacatgccttacaaaggtgtgatgatagaaacagtgaaatagaaatagtttatggcagaactaggttttcaaaactcagacaaattaataagttgatatttttctgaatttataccacaatatgtattcctacataggagaaataaattgcttattaaaataaccatgtaatggatgtgtatttttagcataaagttaaagatgtttttgggtcctgtaccagatcaatgaagtgttggaatttgggtccttgaatttagaacttacttaaaaaagagtgttgtaattattcttccctgttactccgaattgttactgaaacaatctaagtgctgctagaggtcattttgcccatcaattttatcttctgaaggaacaaatctctagaaatggtaaagaattctcacaagggagagtttttggtgtgagaagcaaagaagtagaagtctgtggttggactgtgctttcatatgaaaactgtggcaagataagctcctgggaagctaggaccctctgctttctgtacagctgagtgaacacatgaagttcatatccaggtcacagaaagccctgggataatgctaaccaaaaaagtgaaagacctatattataagaattttgagtccttaaagaaagaaattaaagaagataccagaaaatggaaggatcttccacgttcatggataggtaggatcaacatagtacaaatggcaatcttgccaaaagaaatctacagattcaatgcaatccccatcaaaatcccagaacaattcttcacagaccttgaaagaacaattctcaactttatatggaaaaacaaaagacccaggatagccaaaacaaccctgtataataaaggaacttctgggaatatcaccatccctgacttcaagctctactatagagctatagtgttttgtgccagcttggtattggcaaaaaaattagacagataggccaatgtaattgaggtgaaaatcctgatattaacccacacacctacgaacacctgagttttgacaaagaagctaaagttatacaatggaaaaaagtatcttcaataaatggtgctggcataactgaatgctggcatgtagaagactgcagatagattcatgcctatcaccaagcacaaaacttaagttcaaatggatcaaagacctcaacataaacccagccacaccgaatctattagaagacaaagtgggaaatacccttgaattacttggtacaggagactgcttcttgaaaattatacgagtagcacaggcactgagatggacaattaataaatgggacctcctgacactgagaaactgctgtaaggcaaaggacacagtcagcaagacaaaatggcagcccccagaataggaaaagatattcaccaaccccacatccaatagagggctgatctccaaattgacaaagaactcaagaagctggtctccaaaacaccaaataatccaattaaaaagtgaagtacagaactaaatagacaattctcaatagaggaatctaaaatggctgaaaggcacataagaaagtgttcaacatccttagtcattagggtaatgcaaatcaaaacaactctgagataccatcttacacttgtcagaatgactaaaatccgaaacaccaatgacagtttgtgctagagaggatgtggagaaaggggaacactcctccactgctggtgggagtgccaactggtacagccatgttggaaatcagtatggtgattcctcatgaaattgggaatcagtctaccacaagatccagcaattatactcttaggcatatacccaaaagaagcacactcatacaacaaggacatctgttcaaaaatgttcatagcagcacgatttataataggcagaacctggaagcaacctaggtgccccacaactgaagaatgggttgagaaaatctggtacatttacagaatggagtactactcagtggaaaaaaagtaatggaatcttgaaattcacaggcaaatggatggaactagaagaaaccattctcagcgaggtaacccagtcacaaaaagacaaacagggtatgtactcactcatatatggattttagacacagaacaaaggattaccagcccacaatccactccacaagagaagctaggaaataaggaggactctaagagagacatacagggtcctctggagaaggggaaagggacaagatctcctgagcaaattgggagcatgaggggagggaagagggagctaggagagtgaaaatggaagaagagaaggggtagagaagacatgagggagcaggaagtttgagttggggggaagaatagaggagagcaagataagaggtaccataatacagggagccattataggttcaaagagaaatcaggcgctagggagatgtctgtagatctaaaacaatgacaccaactaacaatctaagcaacagaggagaggctaccttaaatgcaatcccctgataatgccctgatattgagagtgatgactgacttatatgctatcctatagccttcacccagcagctggtggaagtggaagcagacacccatagctaaacactgaactgaactggaatccagtttcagagaaagaggagtggtgagcaaaggggtcaatatcaggctgatgaaacccacagaaacagctgacctggacaagggggaactcttggttcccagactgatagctgtgaaaccagcatgagacttattgagaccccatgaatgtgggtgtcagtgaggagacctcagaaatctttggagccttttgtagtagttcagtacttatccctagcatagttgtggactttgggagcccattccacatagagggatactccctgagcccagacacatggggggtgggcctaggccacatcccaaatgatatgacagacactgaaaaccccctatggaaggccttaccctccctggggagcagaaagggtatgggataggtagggtgtttgttgtgggaggggcagggaaggaggggaggcagagggaactgggattgacatgtaaaacaatcttgtttgtaatttaaataaaaaatggagacaaaataaaacaaaacaaaacaaaagttagacaaacaggaagagcattagacaaagtagcagaaatgtttagtcagtgtgaaaatctaacatgattaatatcatttcacccatttactttaaagccaactttgctgatttaaagcacttttagattgtctacagtatgaatagaacatgttcaaatgcaaaaaaaaagcaatttaaacatgttcttttttttaagggcacattttctttttgatgattgccctaatatttggtagccccattctaaattttgccctcaaggtgccaatggtaccacccctctctggagtctccttattccagactccacccctaaaaagctccccattggtggctccacctacagagggcattaaaagcccccagctctggattcacctagtagttcctggttttgtgttctcctgggaccacccaggaatactttgctcagagtaaacatggatttattaattcagtctgatcggcttattgtatcagttgtggttggtttctagtatcctttccaccaactgggatttttaaacataacacctatcactattaaagcataaggcctaagagtgaaagaatggagtgggtatgcagagaaaagaaagtaaaaggtccctcggagttggaaaaagagagtctattcttacttctcatccaggcccaagcctaggatggaagttgagtaaacagagttatctttgttcatattcagtttagcaaagtgctttgttggttttttgagacaggtcctcacatgtctatggctggcttagaaactgctttgtagctgaagatgaccttaaacgcttgatctcactgtctctatgtcctaagtgttaagattacaagcttgcatcacttatgtcctgcttaactcagccctattcaacctaagatatatagacatgtgacacatgaggccatgtttatagctagaacaaggcaggagtctcgttggggctatacacactcattggcagtctcttcaagaagcagacagcattggggaatccaaaaattcaacaatatgggaatcttatatgttctattatgtgttcatttatgtgggaataaagtttatctcatgctatacctacttggttatagatatctcaatagataaattttgccattaaatgaaattgaatctttttaattgaatgattgtttaacagctattttatttctgttatgaaatatgagctttgcattaatgtaataaatacgatgatgatgatgatttgcccagattaattttttctagtacaattttcctattgtcctttggaggacaaatctcttcttagtttttgaaatttattttctacatagttctttttaaaatatctcctctaaccttggaacactgagccctaaatgttgtgcattcatcaaatcccttccctcagggcttggagaaaacatggaagagaggtggaaagagnnnnnnnnnnnnnnnnnnnnnncagaggggcatggaggacaccaaggaaactaggccttctaggtacaacagtaccaatgcacatatgaactcacagagagcagcatacacagggccagcacaagtctgtaccagttggagtcctagagctgaaagaaatgaacacacaacctatccctaacccagaagcaatctctaaccaacaaccacttgcaaataaaaattcagttttctccaaagaagcctcaccagggaaacaaatcacttaaggataggccccatgcccagaaatagctggccaactgaaaacaaacttaatagcatctttggaggttccttgtcatataatatcatatcagggctttcttttcttttctttcttttaattttatcttttaaatttttattttaattttcctctttcttggacttcttcttgggatcttttccttctgtttgtttgctttgttatattccaatgtgttagatttttgttttatcctattttatttcattattatcccttagaagcctatgtgttttctaatgagaaacaaaaatgggtcctcagcataccactctgaatgcgccagatctcatatgatcttggaagctaagaaggaacaggcctgattagtgcttggatgggagaaacagaaatggaatgaatctgaatgtgaggggaagtgggaaggacctagtagagggaggaaaaactgcaatcaagatatattacatgaaaaaaatctattttcaataaaagaaaaaattccctctactttgctttaagttctccatccatgaaatattttggtattataaagagtcaatttattattattgccaggttatcaataaaaccactttcatgagcaagtctaaatgatcctgtattattgtaaaagagcaccatcagagtaaattataattgcatttcttttatgctgaaataaaaggacatttcctcagatctttactcacaccgaactattaaacgtgtattctaataagctacattcaacattttaaacacaccatctttattggtttctttctatactccatttcatttactgatctgcatttctgtttatgccagcatcctctaataatgctatgacttgctcagcaaaacgctgccacttctggcgactgaccaagcttgcacaatgtgctttcacagaaaagcttcctcatagcagactactatgtgaactattttggtagggattttataatgctgctttgtaattaaatgagagaaaattaaggatctgatttcaaattaacttatacaaagtcattatctatcattctgaccagaaaggcaataggctctgtatgccaattgaataatatgcagcaagtaggacagacatgtcacttattttaagtcttaatattatattcatatttgaacacagtctaattatatttaataaaatgtagtgatacataaaaagcacaaatcatgcatggagtttcattccttaaactaagatagcatctacaggcttctgtgcaatttactaaataaaattctactgtaatttaacttaaagcatttcaaatgagctcatcatcatgtgtctttgagagaaatatatttttgaaggtttaaaaatgtttagtgatgaatttggagttttataatcatgaaaattcaagcatgcttatgttttgtaattctttctaataaaaaactgagaagtattttaattaatctcttctgagtataaatatagaaaagaaaatctttcacattccaaaaaaatcactatgctatgaagagactctcaaagcatattctcccttgtaaggtttatgaaacaaatagtatcattatttgtatagcatttactaagcacaaattatcagtatttgattttgttgattttgaaaatctatgaatatatataattaatattatagagttcttatttttcactgtcaatataagtgggtcttgcatcaatgctaggtcataaatctgaagtgttatttttccatttgttactttgtgtgttcccgtgcacatacaaagacagaaaagcttcttgattgcctaaagccattgctgtaagaagcaagaaatcataaattgattgctggttattcttacctcccatgaacttacttctaacaagagtgaaatcaataagcaaactgactccaccactctaccagcttgcctttctaatcaggttgttgcttcatttaattaaaaaattatgtttttttattatatgtatatgggtgtttggctgtgagtactccaggcatgcagtgcctgtggaggccagacgaggcctcaaggtcctcctggatctggagctaaagtgagttgagagctgtcatgtggatgttgggaactgaaccttgtcctctttaataacagagcagccagtgctgagccatttcttcagcccctgttgctctgtttctactgagatgaatattctaggaaccagtgtggtaccagttggagcatatccacttctgttttggaagaagttctagtgagactattttaaacatacataaggttagaatattaaaatttaaacatattgttttgttctgaaaagacaactggcttgtcagcatataacacaaagtcatctgtaatgcatttcttaaatacacaaattcagaacccaggtgactctagttccttaaaaacaaacagaaacaattaatttgtgcttggggcatactttcgtggtagagtacttgactaatgtgaacaaggctttaggtttaatattctgcgttaagaaacaagcgaaagtaccctttttgttagaaaatcagaggaaatacaattaagtgattatagaacccaccaaagtcaacattttaattacataatcataggattaactatgcttccacctgctaggtgcatttgaaagtttttctaagcccctatttctatattatgcaatatgactaaatcatttggtaaaatttctgtctctacggattttatttgttccctcaaaagagatgtaaaagtcttggaaaaaaatcctactaatttctatattttccttcagtcaagtcactttgttgagttatgtttatgagtagagtaaaacaaggaaatatgttttgtatgccctcattttagcacatcactgacttttaaaatccaactttcatttacaaaaaacaacaacaacaaaaatcatatattgggtttgatacaattccaggggaaatgttggctttctacgtatttaaaaatggttatgttatttagaaattcacatcattttggttgttctataaatgctattatgaccccacaactaatttaaagttatggtggaaaagtctattatgatgaatccaccctgcatttcttgacttgataaatttccctaaattgtgttttcttttgtttgtttgttttccttcccttcagaaaacaggcttctacttagttttctgctactttaaatctaaacttcccttccatgtttctgtggtccaaaaccagacttccttttctctctccagcattgtgtgcaacttccttttaaatatagtttctgtgccagattgcaaatacagttttgaaggtaaaaaaaggtaaaagcttcgaagtctggaaaaacaatatcttggaagatgaatctgaaaaaaaattaaatgaatagtttccaatctcagacactatacaaccctttggttttccatagctgaattaatcaataaatatgaatactttggacattcatctcattttagcacattgttgcctttaactttttaagtgtgtgtgtgtgtgtgtgtgtgtgtgtgtgtgtgtgtgtatgtgtgtgtatgtgtgtgtgtatgtgtgtatgtgtgtgtatagagagagagagagagagagagcccatgtgtgaaggttagaggagacctttgtgggagctgattctgtctttttaccatgtggatcctgaggatcaaagacttagattgtcagacttgatgataagggcctttacctgctaagctgtcttgtccgtcctacattgtttattttaaaaatctaatttcatctacccattaaacttatggattttctccatttcttcccactttttgctgacatgcatgacattttctttcattagaactgtgcattcactacttatcttgatttcatgacaaaagaaacataaggcataaaagagtgtattctggctcagaatttgaggggatgcagtctatcttgacaagaaagacatgcagatgcagttatgaaaaagatagtcacattgcatttgtagttaggaagcatccaaagatgaatgctagtgctcagccctcttacttttttttacagtttgaggagcaaagcccatggaatggtgtgtcctacatttaggatgggttaacccaactcaatgagtccaacctataaaatccctcacatacatatccagatgcttgtctccttggaatttctagatcctactgagtagacaatataaataatcacagcctttgtctccattccagaatttctattatttttattggtatggctcccaataatctcctaccattcctataccacaaaatatgttgttttcctcgtggcctgaatatcatacatgatgcatactgttcattaaaattagtgcattattttgcttatacaaatcttcatactggaaagacacttgcaaaaccaatttactcaattccgataaacccccaggagattattttatttctgctactagaatgaactcttctgtgtttgttgctgcccactgggctactcctagctcccagtctgaattcctttacatatgtagcagtggttctcacccttcctaatgaggcattcctttaatggagctccccttcttgtggtgactcctccaaccataaaattattttcattgctacttcaaaactgtaatttttctactgttatgaatcataatgtaaatgtcttcattttctggtggttttggcgacccctgtgaaaaggttgtttgatcctaaacaggttgcaattcaatggttgataaccgctgatatatagtgtgtgtctcaatcatgcattttttccttctcagcaagtgtttaatttttctatgttactgatactatcttacaagcaatgtaaatttgtgcctcacaaactagttgagtaacttgataaataaatgatgaaacaatgcaataggtgttattttgttgggaaaatgatgaatgatgagtgaggagtgaagagaagataaaagaatgatgacagacatgaaagaacaaaaaggtaaagggaccaaaggagctggaagatcacagattatataagatagaagtaacaggacagaggaactgcaaagaaaaaaagactagaagccagggagtagggcatctcatttgaaaattttaaaagtgatgcaattacggatggtgggtaataaacattaagatgtggccatgcatgtaaactgctaaatgtcaaccttaaattatccttcactttctatgtgctaatttccatttataataaacattactgagggatagggatgagacaaatagaattctagcatactcccaacaaacttaattccttcactttgagtgtgggtaaaatctatgaatacggggccacctggcaatgattatataacattttatagcaaacagagtttgtagtaactgattaattgaatgattcactaagggaaggttaggttcttttccccaaaagaaatttgatgcatgacagagattcaaaaaaagaaaaattctccattgttggatttaatgagggaggtgcccttgtagcaggaaatatgcattcatcgtggacaaggaaattgggacatcggtttcctagtcataaggagctgaatcatctcacaactatatgagcttggaagtagattctaacaccagataacagcccagctggacacacacattcattttaacctggggagatcctatgcagcagtaacagccaatgttgtagccagacttaaaacatacacaactgggagctgatgggtgttattttaagcccataaatgtgcaatgtgttagtgctttagtttgaatccagaatgcctataaaggcccatgtgtcaaatactttgtttttagcttgtggtactattagaaattggtgggatatttaagagatagggccaattaaaagaaggttaagccatgtaggtgtgtgcaattgaagggaatattgggatcttgggcctttcttgtttctcaacgactgtgaagcaaacagatttcctcttccatgggctcttggtatgatgtactgtgttgtcagagaccccaaagtgtagggcatcagaaccatgaatttaatcctttaaaatagtgagtccaaataagcccatcttctttgaagttgattactttggatatttttgccgtagtgatgaaaaactgaataaaatatttagaaaactaatatagggtataagttgaatacactaaaatgtactcatttaaaatgtataatctggtgagttgtgacacgcatgtcccactacacttgagatatagaatatttaatgtcacatcctgcatggggggcggcttgtagcagtcccacactacagaggctatttattccagactgatgtctctggggctgagacagtagccagccaaatggccccgggtccaaccctgagtcaggggtgggtggatggggtgttgctggaccgggaaactcctaactacccaatggcgataaagaccagacacaggcatcttgtcatttcaggagagctctcagtccttgctggaaaattggagtttcaggttcattcaagcatcatcctaaacagatttccaacagtgggggtgcccgcagaaggcatctactatcacctacatagctgacatcaagtaatcctttcagcattagcggcacacctgaacagtccctaggcatgtagacaaactctcaggacaggtacaggcagacccagggcctatgtctgttgcaaactaggagacattctctactgaggccaagccatcctgctgctgcaatctagccagcatctaaaagacattgggagattcaggctcctggaaaatggaggggaggtttggactccaatactttattattgataatttttgggccctaacacgcgcaaattaatttgtactctttttactgtggctatccaccaaatatcaagttttcttactacaggaatacatgaccaacaaaggcacagcaatctgggggcccaggggagaaaacactttccagcaatcagaatgcagagacaggaagatcatgattttaatgccagattgggatacagagaaaaagaaggacaaaaataagagagaggaggaagggacaggagccctaaatcataaaatggagagtttctcactgattgtaaatattgccctggactgttgtacatcttgtaatttgactagtatattttcttgtcattcttccaaactgaacatatgaatcaagataaaaataatgtatggaaatacttttttaaagggttttctttgttctttcccatgtcaatattttttttctttgtgaggaaagatacaatagttggggtctgttgacatgttttaagtgtcaggatgaaggtcacatactctaggggtgacaaatgaagacaataagagagactgcttctgtggtaacatggagtcttccctaccagtctccaaggaacaaatagattctgattacatgaaagaaaggaaaaccaaagcaaagtaaaacaaaacagagcaaacaaatctcatagaagccatttgtcatgttttcagcactaaatgtagatcataatttttagtttgtattttcctaatgtaacaccttattataaagatcttatatattatcatctgactcttcctgatgctacttgtcaatctttccacactgatttttctgggttgctctttggattgctgttatttcctcatgagtctatcttgtctccttaccctgggttatctccaggttagtcaactgaaacctatttcagagtaattacatgacaattaacctacagaagactctaaaatgcttcacaactaatgtaaagtcacaacttggttccctcagcatgttttctgtgtctgcttttctttacattaactttaggttatcctttcaagctccatttttaggtgaaagtaaaagaactactagtacatagattatatgatggacaacactctgtgaaatccatcattcaaggaatacaggatattggatagtgtgacctatgatttataggtgggaagacaccacttatcatctctaggaagatatgttatacctattggctgttctcatgctgtgcagtatattgttttcgaggtagggtaaatctcttatcttgttagagttgtttatttcctttgtacatccatgaaagcaggaaagcaataaagatgctcataaggtacctcatgggctactaatttttgttctcaatcggggagactgagagtggaaatgtggatttgtgcacagcattgtcttgttgtttgaagaatattcctcgagaaaagtagagacaaaggaagaactgcaaacagcggaaaagtcacatctgctcatggctgtatagcttctgagttgttcgttactgccaggagaaaaccaactgaagatgtgtatatgcattaaatcaaataagaaaatgtagtgatacttactgaaaagtctgatcaagaatattgaatatgcttttttaaatctagccacatttccatcattttagtacattttttgtgcatagtagaccttatatgtttattgcaagtactacttcttacataagttgattaaaatcatgtagtcttcataatagagtatgttaaaaatccaattcataatcaaatatggtcacttgactaatctttgtattttgttatcagtctttcatgcttacataacttaattctcccaacccaaagccttaagtcaaagttttaaaaatctggtagaaaactagtttatttgaagaccactagtaatcatttatacttctaagagaatgcattgtcctggacaaatgaacagcagaaaccttttgtcttcctttgagctattttaatcattagcttcattcttattaatgaagttgttttattcttaaaaaaactgccagcaccaagtcaaactgattaattagcctggtttatagtctgtacactttccatggcccattgctttgagatttggtggcaaatacattctaagtatgttgagatgctctgattcccctgtatctttttttgcccatgttgatcaataaggaggaagttgtagtgagtagaaagagaaagaggaatgatagccatttgatttgacatcctattctggtttctagcatcagaagtggtttcatattgattattaccaggatgttccttgagcaaagtagagatgaaagaactgagagcagcaggaaactaggtcactcacttgtaaatggtagataaaaacaaaggcatagttcaggtactgcctagggactagaagtaggaagttagctaggagtgatctgaagatgacgaaatgaagtggatgggatcacttcatttgagcaggtgaaagttaaggaacagatttacaagtttcaatttattctacacagagataaaggtgagaagtcatacagctgtaaattttctttttttaacttaaaattgttttaaaatcttataaactttattgtaaaaaaactcatcaacctattaatcaagcaatgaatcaatcaatcaatcacacaccaaaactaaccagacccaaagtctatacaactcactgactttctatacagttaggacaggcattgagaatggaagatgaggagcttcatattgaattttaccctcttagcattgaatatatttagctaccatcaacatcccaaactccattgcagaattagaactagaaaaacaattagcttcatattgtcttccataatttgtatcagttacttgaatttagccaattttattcttttctttgtgtcatactgccccttacacacatagttgtttatatgtattactcctagattccacaaatgagagaaaatattttttctcttgagtgactgacctcacttaatattcattcctgtctatccattttcctgaaacattctaaacttcatttttctttagaggtaggtattattcacatatgtagataccaaattattcacacatctattgattataatctagtttgattccaattctttgatatagtgaataagactgcaataaaaatggggtacaaatatctccatggtagtgtatagatttctctgggtatatgtctaggaatgaaatggctgtgtcatatggtggttctattcagttgtaaattttcagagtcagttttaagggtgaagagcccataaatacaggagacatttttaggctctaataggcgaataatgcctttaaatttagttagagagatcttaagtggtgcagtatactattttttggtagtgtaaatgctgcatgcattcaaccattaaacttgaggacgatttttgtctttgagataggatgtcatcatgcatcacagtcattatatattactatatactgaaatgtttcagtgtcacacaaagaaaaaacaaagattgaattcatttctatgagcatcctcacctctcctgtcatacctctgaataaagaaacataaataacaacaataaaaacaaaattatcgtctacatatttgtatataatgccatacattttcaaagctcttgtttctctcataaaataccctactggcaggatgatacttattattttacttatgagaaaaacagataagaatatgaattgtaatttatcaaatttcacaaaacagcttaatctttggctttgtacaagttctgagacataaggagtagaaaaggcaatactccagtggttactatcctctaaagcaatccagctacccccatggtgtcaagaatctataagcggggtagaggcacacaagaacttagaacaaaacacagaaggtaattattttgttttaaatttttgcttgtattaaatctgataaggcaagttgagtgaattccattttgtataaagcagtatgaataagaatgtattagtttagtatgtgacacacattgagaggtagattcaggaggattgctacaagattgaggctagtctggtctacctagtgagtttcagactagtcagaattccaaccaggccctatcccaagaaatgaaaagagaaggagattagactcatgtagtttataattgaaatagggagatatgtaataaatctaacccactcagttaacaaattatttttagacatggcaaacacatctgagtacaaataggaggaataaacccattataaatgagagtgaaattcagtttttaggagatcatcagctatcatattagctaacaatgaaaacagagtgaaagcatttaatttaggttgtcagattaagataaagggagatataaagtaatagaatggatttcttcatgaattaaagaataaaaatctaatcttcagttttaagtattgtatctcaaaaattaaactctgcccataaagtaatcaatatatgacttaccttcattaaagagctatatttataaatgttccataatattaaacagtttattattcaacataaatgtcacaaaatgaaacacttggaatgtgagctaagttcatttacattccaagtgcgacattgccagtgttaaaattgcaggatcaagttaaaattttgttaccagtattaaaattagtcatagcccatttaattatttaaaagaattataatatcatcaatggtaattacataggtaagaaaatcaattatataagaccaatgtaaagttttaaaatacaaagagcagttggtatatagccagtataaatgaacctggtacttagccaagaaaaaaagtaccaaggtagttctgccaagatttatgtaaaataaattgcataatttttaatggatctgtggtaatgttcatataacacagagactttagcattttggagtaaaggacaaaaatatttaaaaggacagaacatttatatgggtgtcactaatcaggctgaaaatgcatttggagggatcctttagatcagtagaccctattcctacaccctacatcaagcatagattttcatgtatgttattatacttcccatgtgagtgaatatattatagggaagatataataattttatgtatgagaataattgtctcttaattggatgggaactggaatgtaatcctttatgctaatcctttgtttactgagatggagccagagatcttgtgtgactcccccaaggctataaggcagagcagggattagggtggacatttttctcattcttggtttaaaaacccatttttcagtcacgtactaactttgtgtttcagacgaaggtgtgactttacgaaacactcaaaatatttttatatcatagtaagaataatgatgaagatgttcataatatggataaaacatggttacaaaaaatcaagccttcataaagtcattaggtcaatttacctttatgtccccaaaccaagcaaagtgaacttgtattgtgccagatgacctcatgggaagcagaacataggttcaatgaaactctttcaattccagtcaatgaaattctttgccagctctaaaaatccaattacttcacccattttgaagatcaatatttgaatcaatttatctctatccaaatccatggtaaagaagattgaaacaattggaacaactgttctatgacacattttggttgaacacacagattcactaataaaactttaatctcctcccatgtctaggagcccttgacattcccctgaaatgtgtatatctctcaaatgcgatacatgttttcatactaaaaaaatagttccctctatttcctgagaatcacatttccatttcttagaatgaaaacattttcttttcatatcttccaatacagttctttataaatccattaaaatcttatactagattgatagttatccttcttgccctcctctcaacacaaaatgttttttaaaaccacaacagcaactcagccaactttgttaagatgcaggccctttttagacagctgaacactctagtaaattaagtgactcagacagcctgccacagtagaggactgcatattaagaccattttaggatagtcaaaataatgttaatttagtaaatgtcaaatgtttttctgtgtttgcaaccatgagaaaataatcaaagggatgtactatgcctagaggtctaaaagataacaacacagatgttgtggattgagctatgctccacaataattcttgcattgagaattaaagcaccccagaatgtcaccttatttggaagtaaggtcactgaaactggagtttgttaagatgagatcattggaatgggtgccaatacagtactactggcatatttataaaaacatagaaatgaacatttggacacagacacagacatacacagaggaaagaaaaggaagagatcgaaggacctgacaatcatttacaagacaagaagaaacagctgcaaagggcctctagcccaaacagctctcaggaggaaactaccccactgacatactggttttgagtttttgatttacagaatcctgaaacattaagcttctgggtatttttaaaaaatagtttcttttcattttataggtgtgagtattattgcctgcatgtgaatatgtgcactatgtgcatgcagtgtccttggaagccagaaagggctatcagatatgctggagctggagttacagaaggttgtgagccaccatgtgggtgctggaaactgaactcatgtccactcactgcaatagcaggcagtgctcttaatgactgagtcatctttccatcaccaaactgttacatatattctgtttggggaattctgttgcaaccttgaaaaactaatatcacttatctgaagttccagatgaagaaatattttaagacatcactttgtattgatcaatcaaaagtcataaaataagatctaatatagaggtggtacctgataacctctttaatatatatgaaggtttttactatatgtgatgggctttttaaattatctgaaatctccaaggcaactggaaaattcagttaaacaggaatttaatttttaaattaatttgattttatagttcatcataaacacacacacacacacacacacacacacacacacacacacacacactagagaatgagaaataaaaacatatggtatatacttccnnnnnnnnnnnnnnnnnnnnnnnnnnnnnnnnnnnnnnnnacacacacacacacacacacacacacacacacacacacacacactagagaatgagtagtaaaaacatatggtatatacttccctgaagtttacagttatgtaggataaattgttcatgtctgtattgctgtatgttgtgtgtctctgtttctgtttgtgtctatgagtgtctgactatgtgtttgtccatgtctatctgtatttgtgtgtgtgtgtgtgtgcttgtttgcatgtgttttaattgtgtgtataaatgtgtatgagtgtctgtatatatgtgtgcctgtctgtatttatatctctatgtatgtgttttataactgagtcaagcagacctctaggaatacagttgaagagagggaggagggagcatatgagcaagggaggtcaagatcatgatggagaaatctacagacagctgaaccaagctcgtggaatctcatgaactctggaccgacaactgtggagaccccatgtgaccaaactaggcctactgtatgtgggagacagttgtgtagtttggtatatctggtggtccccaggcagtaggaacaggatctatccctggtgcatgagctagcttgttggagcccattccctatggcaggatgccatgctctgtcttaatgtgtgtgtggggggggagagggtcttgcttctgcctcaacttaatatgccagactttgttgattccctgtgggaggccttacactatgagaggagtgggtggagatgggctggaagggagtggtgggagggagaactgtggttggaatgtaaaatgaaattaaaaacaaaataaaaaagttaaaaaagtaaatgtcaaaaaaacccaaatctatttgttctgctaatcttccttttaagagagaaagaccaaaggaaaacatatatacttgcatagtttatacagtattacatatatatatgtatttccttcatatatatgtatctatatgaaattttcttcatccatgttgccatgtttgctggtgccattatgtatttcttgtttaggggatacaagcagggacaagcagaaagttgttctcttcgtcttcctccccctctcttctctggagccaccatgtgagcccaaaaagagaggacacatgccaccggcgtcctcaatcagattagtctttataaatatatagattaataattatggttgatacttaagacagagatagcagataagaaatcctagtcattggccagcagcattgtacctaatataagtctctgcatgttacttgggaccttaatgtggtggcgggccctctggcttttactttctgatccttcttctccagtgttgcctgtaccttagttgtagtgattgcattttgaatgtatcagttaaggctttgcacatgttagctactttgaactgccaacttgatacacctgggagatgtcttttttgcttcctaatttatgcagaagtgccaagcctactgttagcaatggtattcctagctagattgtcaagcctactgtgagccatgctattcctagccagatggtgtaagaaaggtcgttgggcaagccaaggggagcaaaccactaagcagtgttcctctatcctctctgtttcagtttctgccttcagactcttgtctggagttcctgccctgacttcctccagtgatagatcataatctatcaactgaaataaagcctttcctccccaagttgcttttagtcacagtattttatcaaagcagactaacgtggtactctgtagtcagttattctcttcattttgatcagtgtgtatctctatagtaggcttctttgctaccaaaaagtttcttttatgagaaaacaagatgggccagtccttcaggattcctgcttcatgaaagagtctgccggactttctgtaggacacagaagaaagagactgacaaattttgccaaaatagtcaagacagtccttcaaacttcctttttcactgagaaatctgtcagacactctaggcctatatgctgaagatggatgtccctacacagagaaaccctgtctcgaaaaaacaaaataaaaaggaagatggatgccccagtgttacagatgaactttgaatgactgtccaggcagccagatagctgccatttctagagttttggaagttgtttatcatgcacttcctgtttactcaggtaatattatatccttctggggtctttgatagagttaaggactagatatttataattatagttttctttaattatgataaaagataaattatatatgaaactttaaactcacaaagatagatgatagaatgttttcttcaatttttgtcaaatagagactaaatattataactgtaattcttgcttgatacctgttttgttatatgcaattttgcaatgttaaagttaaaaccttcctattcaatcacatagaaaagaggagatgatgtgggatgcccctctgtatgctgtgaatgtgtttttaaaaaagattttattatttattttgtatacagtcttctgtctgcatgccaacagaggacaccagatttcattcaaggtgggtgtgagcaccatgtggttgcctggaattgaactcaggacctctgaaagaacagtcagtgctcttaactgctggccatctctccagccccctgtgaatgtgttttattaacattgattaataaaaaagtgaatttggccaatagccaggcacaatagagccaggtgggaaatccaaacagagaaatggagagaaagaaggtggagtcagagagacaccatatagcttccagaagaataagatgccagagcattactggtaagccatggccatgtggtgatatacagattagaagaaattggttaatttaattgtgagaactagttagtaatatgcttgagccattggccaaacaattataattaatattaagcttcagcatgattatttttataagcagctgtgggactagcctggatgagtaaaaagcttccagctacaactgtttttgtggtattttggcaaagaatgtggctgctttttgcccttgtgcaaaaagtatacttaaatctaaagtgaaaatagttggtttaattacattggcagaagaaatctcaaaacagcctagtattaactctgttgtctggttgttactgctcagtcttatgcaggctatactaaaaaggagcaagctgagcaagggaaaatacaaaatgtatagttcaaggagaaaagagtcaccagaaagtgtaaagaagataaataatgtgttaaaggagataaacagattaaagaaaaggctaatattaaatgaaataaagtgaatggtgacctcagggtaagattccacccagttgagatcgcaaattgtgaaaaggaattaaagaaaagcttagaatctagtgagggggcacacacctttaaccacagcaatcaggagggagaggcagacagatctttgagtttaaggcaagcctggtctacaaagcaagttccagaacaaccaggcttaggcagtgaaggaaactagaaaaaacagaaagctggcgaagatgtaattaaagtaggcagccatgttgttccattcctattaagcagcagaacttgttagctttggccacatggttctggatttagggatagaagaaaggggttatgaaatctccctctacaactaaggaaagccactgaggccaggcatgtgtcaagggtattcctgtatggagacttagagaggctatttcataaagctgtgaaggtgaaacctgagtagccttggagaccccatgatgttgcagataggagagctgtgggatacaggctgaggaaagctgctaacagggagtggaattagcccaagagaaataagtgtgttgcaatcaacaaagcagaatggagttagggatatgaagaatgttttgacttcagacacagagatgtggagttggaatttgtgcagctgtattttggtcttgctttggttccggagttcctcactatcctgtactccattttggaatgataatgtatatcctgcaccattgtaggttggaagcatgtgatctactttttgatttttgattttataggggattacagttaagagattgccatgagtctgagaagagactttggacttttatagactatgggggcttttgaagttagactaaatgtattttgcattatgatatagttgcaagcctatggaggtgagggattggaatgtggcagtttgaaaataaatgcctcccattggcttatagggtatcataaccattattcaagatttttgtgtggaacatgtgttgattacatgttgaacatgcacattgcttcttcatttataaataaataaaaggtattttccaaggttagtactgggtgtttaacagggttgttttagaaatatgatcagtagccatgagttggtggcccggctaatcccagcacttgggaggcagaagcaggtggatctctgtgagttcgaggccagcctggtctccagagcgagtgccaggataggctccaaagctacacagagaaaccctgccccccccaaagaaaacaaaaaacaaaaaaaaaaaacaaaaaataaacaaaagaaatatgatctgtgcaaatctagagagtcaccctaataaacacgatttcaattctttttatttacaattaaaactacagttcttgccattggtagaatgtacatgtggatatgatcaaagcgttgtgctcctacttcattggaatccctactaaatagaaaagaggctcaaggagttagcaatgtacaagtgggatgaaattaacctgtaatgactactggtactgaagtatccaagtgtctgcttgaggactaagtatttactttagaagagaataactctctggctcactctggctggtattggcactttgtcatatggacaatgactcactgaggcctttgtcattctcccattcttaaacattcctgtctgatgaagccccgctctttcaaggtcttaaatcattgtgggatatggtaatataaaatgttacttttgtttttgcctaagagtcattctgtttctttaatgtggctttgtctgccatggccaggcctgataagacttgattttacacttgaattcttttgtttgtttgtttgttttttggcttttcgagactgggtttctctgtggctttggaggctgtcctggaactagctcttgtaaaccaggctgtatacttgaattcttatgtatgtcttccacagtatgaataagctgagtattttttgtattttatgtaaaataagagtattttcagacattattttatcttttatagtttttttttcctttctgtgttcttaagaaatctttgaggctattttaaaaatatgctatgtcactttaatcgaaagttgaaggccttaattcttggagttttgccatatttttcctaatgagcattttttatttatgtaagggagccaaaaacagaggctttcatacggaagctgattttaagtttagactcagatatcttgataagaaatgaaaataattagttataagatgtttaaaatcacttttttgtcacatacatatgaataatatatttcagtagctacataactacatttgtatattgaaatacaatattgcaaacatcctttgttttgctttgcaaaataaatggaatcctggaaagttcataataaaatgttgtgcaaagatatggagtcagcaatcctgaattgttaacagttttcctattttagttggcaatgtggctctgacaaacacttgaacaagtgccctggtccttataccttgaaaatacacgtcatgctggggcatgagttagagtagggcagaatccttacatggggctgggatctagaatctgtctacatgacccaggtgctaggaaaaccaggaattttttataatggggacgctatttgacctattgaacttctatggaacttgtgagagggatggcataaatgtcggtaagagaatattctatgaaaataatgaattgaaaccttttataaaggaagacctaaagtagtaattttcctcttgacattgcaacatgtgtcaaaagtgctaaaccctctagaaactctatccttatctggaatttcaatgttcctttgaaaacctatgcagatttttagtctctttactcattcctgaaagctattgctgctgtgcagataaccctcaaatctatcctgaccacagcttttatcttgaactacagaatgccatctcctagtgactgctcatatctctaccgccctccactgggcttcaagaagtcatcactggcatcatactctaaaccacagataatttcttctttcagtctctcaaatatgtaacaccagagttagtttacaattctttcatgatttcctttgacccattctttgacttttgcttatttgctttctctctttgatttcagtcgctccctctttcctctaccttccttcctttcttcctccccacctcttttttcttttcttttcttttttttctttttttggtttttcgagacagggtttctctgtgtagctttggagtttatcctggcactcgctctggagatgaggctggcctctaactcacagagatccacctgcctctgcctcccaagtgctgggattaaaggcgtgagccaccaacgcccagcccctcctcttttttcttgctttcttcatttttttccttgtatgcctacttacatgtctggttctatatggttgaacacatcaatatctcctactcttttacttccatccccatagctgccatctttagatgatcattatatatggtgtgctttctaatatgtctcttctctgctcattctcctcccccacccccattcctaattgtcttctacaatcccagggagtaaccaaacatgcatgttatagcacccttctagttaatctacctccatgggtgccaggaggctttcatcatgtggctccaatcacctccaagttttactattctggtgcaaatacgtctccgcccttctgaaccactagtgattcagaccacaatacttcctctagttggaacatctgtctgttcttcctaatcgtaattacagctcaggagataaggtaatacaccagtgacatagaaacaaggagaaaaattacaaacctggatggaagtgtttgtctatgtaagatgagcatggtgagtgctaaaacacagacaatgcagggaatctgttgtggaatcattctaggcattttggtattttggtaagaaactttgaataggctaggccttttgtgagaacaaccaaaagatgcattattgcatctggcttctgttacctcaagttcataggcattagattagacagaaaacctttgttgacacttaggcacagagacccatctgtgcaaatgtgcactatattatgttcaccatgttgtatatatagtagaacaaaatactacccatgtaagctgagaacaatgcaatatgtggtttcaaaaacagcaaaattgtcatattaagttggcttgtcaaaggttctgcttaatggtgatttttattgctaataaagccattaagcaccagaaaagatgaccttatcatacacttaacactttggcttcagtatatgaatcaatatgcaattgatttaattaaggaagctgcagagagtttttttcacaacgtgactcattttacatctgtaaatattcaactgccaatgatttttctatgactggtatgacttttatgaatttaaaatggatttttaaaacttgaggactgattctacgttgagtatttatcataataagttggaatgaatttcttaggcctgaaactttcatttttcaaaaaaaaatgtatcttatgtgtataggtgttttgcctggatgtttttgttcccatgtaagtacctgttacccaaggagatcagtagagggcgttggatcccctggaactggagttacagatggttgtgagccaccatgagggtgctgggaagtgaaaacttggtcttttggaagagcctgtgctcataaatgctgatcatctttccaggccccattttgttttaggttacatgaatttaagaccatcacattaacctaattagctttccattatcctaaagaaatgattactttccccctttggcaaaggcagcaattcttcatctctggagaaatatagtaccaataaaaatgtataaataatgtcacttaagtagctttggtaagttgcatttgataactttcataaagtgtgaatatagcctgttgaataatctgttttgctatttcatttactgtgtcttacactttagcatataagcaattggaatacagaagttcaaatttttcattgaatcactgacaattcttggcatatagttggtactcttgactaaatgaatacacgaatgtggcttacatgacaattttgttgctgtaatgaagactggcaattcacttattttacattcttcatatgccacttctacaatattaataacctattctccttcctctaactgcttaagtattaatggatatgtatatgacctaaggctacagtcatcaaatttgaattaaattctcgtcacctattacagttgaacacttttataaaatctttatttaagacaatgtgattttcctggtcataaaatataaaacatcaattatttcaaaccaaatattatgtttatttttaaagaatttttaatagaataatgaagcctacatctgggtgaaacatgaatcacttggtaaattcataggcttgaaaataaaagcaaccttgagaaattatctgagacatttcttggactgccacctcaatttctgtcttctaagagttcaggagggggatatgatatagaaataatggggaaaagggtagcttattgaattactttaatccaaaatacagcagtatctcaaaatattttacattggtatgaattttagtttattgatattaatttaaggttaattttgttagactctatgtatgtttctactcttgtttaagatattgtttatacagtacaattaaaaatgtaatgtataattaagaaatacagagttgcaaaatacagttagtcatctataatagtcaaacatagtcatgttttttttaggttttctagatatacatagctatatttcagatagataggtattttcaaatatttcaaagatgtacagaatatggcatttaaaatgttttaataacttcgactcttcatgacagtgaaaccaataattcgactctttttgacagtgagaccaataaactccagaaaagataatgcacatcaaagaaactccatatggagtttattttctatatggaaaaatctatccatgtgggcaaaaaaactgcccttgcctcaattgctgacagttactgaccaaagtagaccagcaggacacaagaaaggtgactgctaagcttttccaagataaggtaagacagtccttcaaaattccctgcttcacaggaaagtctgtcagatatgctaggcctgcaggattgattacccaacattacagaggacacttggatgactgtccaggcagtcggctgtttctgtcatttctcacatgttttggaatttccttgcctgcacttcctgcttgctcaagtaatatttccttcttaggtcttcaatggagttgaagactagataattatagtttttcttagttaatataaaaataaattagatataaaactttaaatccaccaagatagctaattaagcattttatctatttttgtcaaatagactaattcttacttgataactgctttgttttatgtaattttattatgttaaagttaaaaccttcctttttgattagacgcaaagggggaaatgatgtaggataatcagttggtatactgtgaatatgtattactctcattggttgataataaagcttatttggcctatataaatgtgacaaacaagtcagtgaactgatactaagaagatggggaatttaatctgtgaagaaaggtggtattggctatgtaatgtgtgtaattatattaaaattatttgaaatgatttcttttaaaaaagagttcaggagatggctggggaaataactcagtggttaagagtatgttactgctcttacagaggacccaggtttgatttccatcacccatgttgagtagcatacaatgcctataattccagttccaggagacctgatacctttttctggcctctgagtgtacctgcaagcacatgtgtatatttacatacatacatataaataaaaaaattaaaaatcatagcttaaaaatataagccaatttgtattaacattattttggaagaatctgtgttgaataaattcctttggtaacccagtctgaaccagaagtttgtctttacgtagcatctaagtcctttcttggaaaatgccaacataatttgactattcaatatccagtgaaggttaacaaaaaggtaaccagaaatgtattcataatgacagaaaaatcagtggttgttttgaaaactatcctcactcttcttagctttgctcaatttatcttcacttgtccccctcccaccaacaaactcatatattgaaacaaaatcaccagtggaacatcattgggcttggaagaggtgagctgatcacaagaacagaattctcctgaataggattagtgacctcataaaagaggcaagagaaggcttgggctcagttggcatagtgcttacctaacatgtgtgaagccctgggtgctttcttcagcattacatcaactgggcataatggcgcaggattagaaattcaaggtaatccttcactacacagtgagctcaaggtccgcttatgatacatagaacctatcttataatgaattaaaatagtctaaagagagacaggaaagtttcccctttctgccatgtgaagacataacatgaagacacaactcatgagccaaaaggtagaccattatcagttgtttaccaaatctgtaccagtgtggattttttttttgtcatttttaaaattaatttttatttaaattaaaaacaatcttattttacataccaatcacagtgcctctccctcccttccttccattcccccaccaggccccttcccacctccatccactcctcagggagggtgaggcctcccatagggtatcatcaaagtctgccaagtcataccgggaagggcctaggccctccccagtgtatctaggctgagagagaatccctggatggggaatgggctcccaaagcccattcgtgcactagtaataaatactggttccactaccagaggccccccaactgagacctacgttcaggaggcttggttcaatcctatgctggttctgcagctatcagactggggtccatgagctccctcttgcttaggtcagctgttcctgtgggtttccccagcatagccttgaccccgtttctcatcacacttccctttctgcaactggattccaggagttcggctcagtgtttagctgtggctgtctgcttctgtttccatcagctactggatgaaggctctaggtagtcatcaatctcattatcggggaagggcatttaaggtagcctctccactattgcttagattcttagttggggtcatccttgtggatccctggagatttccctagagccagatttctcgtcattttctttttaatactttttaaaagttaggatgcaaagtaatgagtttcttcatgacatgtcattgccattcattttcattcattcttaccagctcattttattttcctctttaaaatactcccttttattaactacttcattttatttttaatttttaaattactactttttattcttctctcttataaaatacaccctgagcactgtttctcctcctgcacccctcctagttccatcccccacttccactctccagatccactgctccttcatgtccctgtcagaaaagaacaggccttccaaggatatcaacagaacatagcataacaagatgcaatgaggctgagcacaaaccttcgtatcaagtctggacaaggcattccagtaggaggaaaagggcaccaagagcaggcaaaagagtcaaagacacccctacttccactgtgagaagtccaccaaaaaacacaaagttaacaactataacatatatgcagagcacctagcacagacctatgcaggctctatggttgccgcttcagtctctgtgagctcctatgagctttgcttagttgattctgtgggctgtgttttcctgctatcttccacccctctgaatcctacaattcttcctccccatcttctgtgtgtttcccggagctccaggagagggacatgatagagatcctttatcctatattttacctctcttaagacctcttcctccctttcacaatctcccttttagttttgtgacttcttcccatataaatacacacacacacacacatacacacacacacacacacacacacacactcacacacacacacacagagagagagagaaagagagagagatgcatgtacaatttaaaatttaaattttattgagagaaaataatatgatatttgcctttctgagtgtttgactaatatcttgatcttacaccttgcagtacccataactgtgagaaaaatcttctattgtctacaagccattcaggtaaggggggatgtatgaagcagaaatagaatagacataatgggtggagggaatggtttgggaggggacaggaacagaggggatcatgtgagaggagaatggagggagcaaatagtgggagagacaaattgaattggggttggacatcacggagacaagttatgcaactgcaatgaaaactcccaggaatctacaagagtaactgtagctgactccttgcaatggggggtatgaagcctgagctggccatttcctgtaaccaggtaagacttccagtggagagattgggacgccaacacagccatataacctttgtcctgtgatttgtcttgactacaagatgtgctggaacaaaagtggcacagaaattgtgggagtggtcaaccaatgactgattgagcttgagcctcatacctctagagggagcccatgcttgacactgtctggagggccagtacacagtgggtacatagcccagagatctagattagatctaaatacaactggcaaaagaaagtcactgaaatgatccctaatgatattctgctacacttattgattcgtgcctacctcaactatcatcagaaaggtttcatccagcaactgatggaaacagattcagagacccacagccacatattaggtggacctcagggaattccactgaagagaggcaggaaggattgattgtaggagccagagcaatcaaggacagcacaagataacccacagaatcaactaacctggactcacaggtgctcagagactgaaccaacaaccagggaacctgcatgagattgacctaggccctctgcatatatgtttcaattgtatagcttgatcttcttgtgagactcctaaaaggggaagcaggggctagctctgactctgttacctgcttttgggaccctgttctacatactgggttgcctcgtccagtcttaataggagagaaggtgcctagtcatattgcaacttgatatgccatgttttgttaatatctatgggaggtgtgtccttttctaaagagaaatggatggggggacagagagggggaggggaggtacttgaaggagaagaggaaggggaaactatggttggtatgtaaaaaaacaataagtcattcagattatgatattttgttatagtagcacaaatggactaaaatacatatatttatgttcctataccttcgcttcattgtctccactatctggaatattcatctcttgttccagtttaatagttagacagtttttcatttatttcaaaaatgtctgttaaaatttgatgtcactgcttagaatgaacaataacaataacaaaaataagccctttggtctgttcttaaaaagtctccaatgtaattgacaaaaccaaataatataaggcagagtgagctataggccatgaagtaaatctaacttgtgtctagtgatgacaaaatcttattgaaatgcaaacaagttggtttatttgtatgttgtctaaagcaacttttgccatacaatgacagagtttatttgtatatcaggcctacagatcctaaaatacttagtatctgatgttttacagaagaagctcacaagcccttgattcaatggtgtaagtaattaagagatcactgagtggccaatattagtgagtataagcagtggatggtataggaatacattagaatagtgttttgtagtctgtgtgaaagagcaagttttccctaacccaatctatcagagaataaaattcttcctaaatacaataaaaataaattactagagaaatgaaacaaagatgtacaaaacaagtaatccaatttttgcattagatataatcaagagaaaatgataataaattttttattaagagacatattaaccagtttattataggcccggcagagtagggagactaaaagagaagaggaacagggttaatggttgaccgccatggctggttgccatagaggcagagagcataagagaagagagagaagagaagatcagagagagcagagcagagagagaagagtagagagagagaaaaaaatttgtaattgttttctctcagcacttgttttccttagaggcccacatcaaatagtcaccatatagacaccagtctatgtgtcatgattttgattagcacttgtcttgaaaatgactaaccaagccaacttctcttctactggaggctctatgttcatatagcatttggactcaaattatagttgaggagacccacagactatgcttcaagcattccttctcattttgacaaaattttttataaatctgatcacatgcattatcctgatatggtatagacccgagagaataaactaagctctttttaggaatttatcaggaagtatgaactcattctatttaagctaacaggatagcatttttcgtgaaaaatattaccagtatttatgttttattggttgacaaatgcatataagaagttaagtcatatctattccatatattaaatatgattgtggttacaaatccagttatatttgttagaactcatgaaactatatgctgaaaggaacgatttgttatagtgtggaaattatgctgcaatacatgttgattaaaatgtacactgcagggctccttcctccagagtgtctttagtggctaggaagagctggctcagtgtaggggacagtaagccacgcctgttagaggctggctacaggtatgcctgaccacgcctgtcaaggggtggtcaaggtgaggtcagaatgacgcgtgataggttcttctttttcgttttttgagacagggtttctctgtgtagctttggagcctatcttggcactcgctctggagaccaggctggccttgaactcacagagattcacctgcctctgcctccggagtgctggtattataggtgtgtgccaccaacgcccagcctcaggataggttcttaaggaacggtgagcacatgggaagcctttccttgacaagcatggtcaggcacacctgtagccagcctctaacaggcatggcttactgtcccttacagcaaggggcatctgaagtatgcaaattttattggctagaagctcctgaatgcatttcatggggaggatgcttttccttaaggaatacaaatacttaactaggagcacaagccttcctctctccatgatggactgtttggatgaagccaactctagtttttgaaatttgttaaccctttttatgattaacacttgcttctcttaggtaagtacactaattgaattaagtcaagtacagacagtctgaaagcaattttattttattaatttttttctgcagttggtgtgtttattatccatattcatgaccaactttgtgcttaggggcttttttttttcttcttttattttaaagcaataagtgaaggcatttctttaaaaggcacctgttccttaaacaggtaggaaagttcccaaccgtttcctcccttcttggggagcagccccatactggcaccctagaagcattcagcagagcaacccttcccctccccagtccttttccccctttcccagcagctgggatgagtgtggtattccacagctcatttgatcttcaggttcttcaaggatgactccaagctcttcaaatcccagatgctcatgccgccgtccatgcctgtagtgcagaactgcgtgcacttggccttgcccccgctgagcaccgagatttgattgatgctgttctgatgcagcgaatccaggccagcatccgtggatgcaccaccctcagagctggcttttttgtcgaggtactggaagtgttctcgagctgtcatgccacgctgggagtgggagctctgcttgggcacatccagccgaccaccaaagctcaatgtccctgcagcactgtcataggtaaatagcaccgggaagcagttgtggcccgctgccactagactattttctgtgatgaaggtgatggccaggaacggcaaggtttcagaggccagggttgcaacggccatcttcttgtcagcatctgccaggcacacggtgctgtcgtggcttacccaagccacacggctcccactggccgagaagcagacatcatgcacccagccagaactgctggactcgaacatcagctctccaaaaggcatcttagagccccacggtgtaggcgctggccgctcctccacctccttgatataggcagagaagatcatgcacttgaagtcacaggagcctgcagctaggagcacgttgttggggtgccagtcaaggctgaggacagaggagccgatgtgctttttaatgtgtttgcacgcccaccaatcattcacctggtcaaaataacagatggagatgacatgggggccactggccacagcgaacttcttctcattgggggcccagcgcacataacgcgcagctcgtttgatccgcaggatgaccagagtgggcttccaggtgcggcccttcagggtccacacaaaggcattgcagtctgtgctacaggtcacaatgctgttactctcaggggcccagtcgatgcctgtcacctgcccgttgtgctccttaagctcgtggaccttgaaacagttcaaagcatgaaagctgaaatagacacaataaagaaaacacagaatgagaccatgctggaaagcgatctgtgttcggtccttgttccaggcatggcagctgatgggctctgccaggaatctgtagtaggccatagttacttgtctcctcggggcgcccggccacaagctctggacagtcgacacgcccaactggctctctgaaagcaattttaaaagtacaaggtgattatgtgtttctgtcctgttatttgtttgcaatgttctccattaagacaagcttcttgcagtggatgtagagagtgccaaggttatgagttgagtggtgagagtatttggagggagcgggcattggttgactaaagctacaagtttcatgatagaaatacggttaatgtggctactcatggtaagaatttgtctagaacattatcaaaaatgggcaactgaaggcatattgcttgagtcattccgtatgaaccacaggatttccattggaatagtaagaaaaaacagatttatcttgtaggtaatgacaatctattccaagtttttccatagaggaaatgtaatccttgctaagactctataaattaccacttgttcaggttgatatataacccacacacatacgaacatctgatttttgacaaagaagctaaaattatacaatggaaaaaagaaagcatcttcaacaaatggtgcttgtgtaactgagtgctggcaggtagaagactgaagatagatcagaatctatcaccatgcacaaagcttaagtccaaatggataaaagacccccaacataaatccagccacactgaacctcttagaaaagaagtagttggtaccctcaaacgaattgttagaggagaccacttcctgaacattacaccagtagcacagacactgggatcaacaattaatagatgggacctcctgaaactgagatgcttctgtaaggcaaaggacacagtaaacaaaacaaaatggcagctcacagaatgggaaaagatattcaccaaccccacatccaacagagggctgatctccaaaatattcaaagaactcaagaagctaggcaccatcttactcctgtcagaatgactaaaatcaaaagcaccaatgatagcttatgctggagaggatgtggagaaaggggaacactcttccactgctgatgggagtgccaaatcttgcagccactttggaaatcagtatggcagtttctcaggaaaatgggaatcagtctaccacaggattcagcaattccactctttaggcatatactcaaaagatgcacatagtattttttatgtctctgtctttaaaaattcatttgaatgttgcaagatattgaccaatgattggaatattttgttctagttctttaacacgctcccacttacacaagctactatcacatccttatttaaaaaactgacatgtagtgctaactcatgtttaccttgacttcatatgcttggccagtggttcagacgtttgttgtgaaactgttggaagcttaccattaaatattcattgaatgtggaaactatgttaggaaaagattggcaccctgaggactaaactcaactcactttgaggtttgtagttgtttcccaatttgtctcatggaaccactttgtcatgtcttatgatggtaacacttggttgccaagtgtgagttgtagtcaaaacgagtttcggaaacatcaactttgatgtttgcctaggagttaggactttccctttttgagaaaatggaatggagcccaagatgttactagaattttccatatcaaatatgtccattctccatccttacttctctccctatcgatggcctgagttttcctcctctgagtgctcacaacatctgctgctgtttctttcacagtcttttccccattgtgcttaccacatggatacatgtgcttacttctcacacactgaggggactttgacaatggtagctactgactcatagtcacctttatgtcaccaatggctactgaactacctgaaaattttggctagtttatcaatatttgtttaattgaacacaaaaatatattgataataataaacatgaagtgcaattactttctaccatgaacagctttgagcttttaatgaccatcaattcacttaagttcttaaatttttacaagatattgatggtataaacgtcaggaaacaaagaacaatgaagtatcaggtatgttcagaatccaacatttttctttttaaattgggtatgtgtttcttggaactggagttataggcagttgtgaacaccatgtgggtcctggaaacagaactcagatcctctgcaagactagcaagtgatttgaactaccatgccatctctctatctccagtggtcagaattataaagctggtaagtggcagaggcaagatggaaactctcgacttcataaacaattgctgtaccatactttgtctctcaataaaactgcctatatacaacaaagctatttatttatggtttattctggaattcaactaccatttcctgtggctacttctcacttctttatatggttgttgcagtgctgccaaattatacggcagttaaatgtctttataaactatctagtctcaagtatttcattagagtgatgaaaagtgaactaatttaacatgtttctttgcacatatatttttggtacatttatatacacatgcaattatggaactatgtgctgttgttttgtgtatttaacatatcatgtatatgcctttgtgtgatttgtttgcttatgatatgtcctggttgttgtttcatgtcaaaacaaataggtagatctgcactgattatattgaattagtctatatattcagaagtatggatggtggatttttttaaaaaaaaactatttctctattgatggttatttaagttatttctttggggctactatagagaacactgtagattattatgtttgagtatagaatttttttcagggagattaaaattaagtcatttttactctagtagatataggacaaattgttttccttaaggaaaacagtggctctagtagttttgaaatacagaagacaaactacataaatggaaagatatgctgtatccctagatagaaaggctcaattttataaagattacagctttcaccaagttacatttggttttaaaatatgctagtagggttttcctggtaggttcactatatctatggtgtgaacatttgttttaggcataaaaattccatttaaaggctaagttgatcataagcatcataaatttaaaaacaggtaaggctatacttactagtagctgctatttattgatattgcctctaatgacataacaaaccctcatgtctcacgtttattaacatacagattggaatattcacactgatctcctagactccaaagctgagactcataaccgagtttcactgcctctatatttcaagacaagtattcaaatagtatctgttggtaacaaactcacataaatttagctttctattgtttggaaaaatatttaaaatatttttgctgttcttactcactattgtcttggtaattaatgatagagtgatatttgatcctcttagtctatgttttgttgtcttggtgtccgttcttcctcctccccctcttgttttctcctctactttccgccccccctctttcttctccttccccaccctgtcctcctctcctaattattctgatccatgttgagcctgtcaaaatcttgtgagttcagagccctgatttttccacaggaggaagagaaatggcatttttccacagagccatatctaattttagcattgtttatgcaatgactttgaaagtatgttttcacattgatgttattctccttatgtagttcttttggtctaagcagcaatcaaatgtttaaaacatgtataaagggaaaaggccctgatacagcaaaattaagcaaatattgaatgaactcctactatgtgtcaacattgtaacaggccttttgttgatacagcaacaagtaaaacaggcagataaaaagcaaagagaagacgaatattaatactaaaagcagagttgatggtaatgaaaaacaggcttgaaaataactcagtaggtgacataattttttctggaaaccgattgcctacaactctggacttacattttacagtatgattattttatttaattttattgaaacaattcttagcacttagtactaaactcagagcctggtgcatgttaggcaaatgctgttttggagccccaacccaaacatttaattttactgtaaatgagaaaaggcaaactgttacactttttcgatttttgttgcttgaaatcacttactaggtacacatgtactgggttggctattagcttgcagttattggagcaccaagtgcttccacctggataaagacttctgctcaaagtttcatattttttctggaattatgtactctgatataaaatgaagactgtaatattaaccatgtgttagtgacatgtagtagcttagattcgaggaatgtacactttagtaggtattttataggatttaaattacattgtatttatttgtgcatgggttggtgcttgtgtgtgtacatggatgtgtgtgtgtgtgtgtgtgtgtgtgtgtgtgtgtgtgtatttgcacatgcatgcaacagggtgcacccgtagaggttaaatgacaacttgtgagagtcacttctctttctaccatgtgggtcacagagatcatactcaggttattagatttggtgcctttttctgattaaccaactcaccataccttaggaattttaacaattatacatagaattaatgtggtactatttgaatgtgcttcactgtctcctgtgttaacaatcagtcttgagctggcagcactattttagaagttggtggaaagtttagaacatgggcttaattagaaacaggaggccattggctaatgtatttgaaagttatacctagtcttcagttccttttcttcctttgcttcctggggactataggtgaaggtcctgtttggggggcagggtgtttagtggatctagaaggagaaatggagaggagaggtgtgttaatatgactaaaatattttgtatgaagttttcaaaaaataatataaatatattattcaaaaataatgggaatctgctagcaccccactcttctattctgaagccgacccatccannnnnnnnnngccaaacctaagaataataggtgtagaagaaggtgaagaaatactgctcaaaggtacagaaaacatattcaacaaaatcatagaagaaaacttccccaacctacagaaggatatgcctatgaaagtacaagaagcttacaggacaccaaacagactggaccacaaaaagaagtcgccccgacacataataatcaaaacaccaaatctacagaataaagagaaaatattaagagcagcaaaggaaaaaggccaagtaacatataaaggcaaaccaatcagaatcacacccgacttctcaatggaaactctgaaagccagaaggtcttggatagataccctacaagcactaagggagcatggatgtcaacccagactactgtacccagcaaaactttcaatcactatagatggagaaaacaagatattccacgacaaaaacagatttaaacaatacatatcaacaaatccagcactacagaaggctctggaaggaaaactccaacccaacgaacataactacactcacaaaaacactgtcagtagttaatcgaatttcaccaaacacaaaaagaaacagaagggcaaaatccacacgcaatgataccaccaacaataaatccaaaactaagaagaaccaatgaacaatggacgttaatatccctgaatgtcaatggtcttaacttacccataaaaagatacaggctaacagaatggatacgaagacagaatccatccttctgctgtttacaagaaacacacctcaaattcaaagacaggcgatacctcagagtaaaaggatgggaaaagattttccaatcaaatgggctcaagaaacaagctggggtagcaatactaatatctaacaaattagactttaaactgaaagcaatcaaaagagataaagaagggcatttcatactcatcacaggaaaagtccatcaagacgaagtctcaatcctgaacatctatgcccctaatacaaaagcacccacatttgtaaaaaaaacattactaaagctcaaaccacacataaaaccacacacacttatagtaggagacttcaacaccctccttataccattggacagaaacactagacagaaacttaacaaagaaacaaatgatctgacagaagttatgacccaactgggtttaagagatatctatagaacattccatccaaacacaaaagaatatacctttttctcagtgccacatggaacctcctcaaaaattgaccacatagttggcagcaaagcaaacctccacagttacaaaagtattgaaataactccctatatcttttcagaccaccatgcattaaagctagaattcatcagcaatacgaattgcagaaaacctacatttgcgtggaaaatgaataactcccaattgcaccattccttggttgaggaagaaataaaaaaagaaatcaaagactttctagaatttaatgagaatgtagacacaacatacccgaacttatgggacaccctgaaagcagtgctaagagggaagttcatagcactaagtgctcacatgaagaaactggaggaaagtcacattagagaattgacagaacaactgaaagctttagagcaagaggaagcaaactcaccaaggaggagtagacgccaggaaataatcaacctgagagccgaaatcaacaaagtagaaactaggaaaacagtacaaagaatcaatgaaacaaagagttggttctttgagaagatcaacaagatagacaagcctctagccaaactaaccaaaaggcagagagagagcatgctaattaacaaaatcagaaatgaaaagggagacataacaacggacactgaggaaatccagagaatctttaggtcatactttgaaaacctgtattccacaaaattggaaaacctaaaggaaatggacaactttctggataaatatcacttaccaaaattaaatcaagatcagatagacagtttaaatcgaactataacccctaatgagatagaagcagtaatcaaaagcctcccaaccaaaaaaagcccagggccagatggcttcactgcagaattctaccagaaattcaaacaagagctaattccagtactcctcaaactgttccacacaatagaagcagatgggatattgccaaactctttctatgaggctacaatcactttgatacccaagcctcacaaagatatgactaagaaagagaactacagaccgatatccctcatgaacatcgatgctaaaatactcaataaaatattggccaaccgaatacaagaacatatcagaaaaatcatccaccatgatcaagtaggctttatcccagggatgcaaggatggttcaacatacgaaaatccatcaatgtaatccactatataaacaaacttaaaaagaaaaaccacatgatcatctcactagatgctgaaaaagcctttgacaaaatccaacatcccttcatgataaagatcttggagagaacaggaataacaggaacatatctaaacatgatcaaggcaatatataccaaaccaatagccaacatcaaagtaaatggagagaaactcaaagcgtttcctctaaaatcaggaacaagacaaggctgtccactctctccatatctcttcaatattgtacttgaagttctggctatagcaataagacaagaaaagggtatcaaagcgatacaaattggaaaggatgaagtaaaactttcactatttgcagacgacatgatagtctacattagtgacccgaaaaactctaccagggaactcctacggctgatatacaccttcagcaaggtagcaggatatgaatataactcaaaaaaatcagtagccctactatatacagatgataaatccaatgagaaagaaaattagggaaacatcacttttcacaatatccacaagcaacataaaacatcttggggtaacactaaccaaataaagtgaaatatctgtacaataagaactttgagactttaaagaaagaaattaaaggagataccagaaaatggaaagatctcccatgctcttggataggtagattctgtctggggtgggactgaagatcttttccccttctgtaggctttttgttcttttgactgtgtccttagccttacagaagctattcagtttcatgaggtcccctttattaattgttgaccttggtgtctgtgctaccagtgttttattcaggatgttatcttctgtaccaatgtgttcaaggctatctctcactttctcttctctcaggtgtagtgtaactggatttatgttgaagtaatttatccacttggacttgagttttgtacatggcaatagatagatctttttgcattcttctacatgacaaaatccagttaagtcagcaccatttgttaaggatgctttctttttttcattgtataacttttgcttttttgtcaaaaatcaggtgctcataggtgtgtgaatttatgtctggatctttgattcaattccgttgatccacctgccctttatggcaataccatgctgatatattactctatctctgtggtagcactttaaatcagggatggtgatacctctatcagttctgttattatacaggattattttagctatcttgggttttttgtttggttgtttggttttccagatgaagctgttatgtaaaaatttgtgttggaattttgatggacatttcttaatgtctgtagattaatctgtagattgcttttggtaagatgatatttttaccaaataatccaatgaaaaatggcgcacagagctaaacagaacttttaacagaaaaatctcaaatgactgagagacatgtaatgaattgctcaacatccataatcatcaggaaatgcaaatcaaaaccaatctgagataacatcttatacctgttagaatggctaaaatcagaaatactgagaacaacttatactgaagaggatgtagaataaggggaacactccttcactgctggtgggagtgcaatcttgtacagtgactttggaaaccaatatggtggctactgagaaaaatggaaatcaatttacctcaagacacagtgataccactcttgagaatatatccaaaggatgatcaatcataccacaaggacacttgctaaacaatcttcataggagcattatttgtaatagccataaattggaaaaaacatagatacccctcaaccaaaggatggaaaagaaaatgttgtatatttacataatggagtattactcagctttaaaatacattgacatcaggaaatttgcagacaaatggaactaggaaaaaactatcttgagtaaggtaaccaagagtcagaaaaacaaacacagtatgtactcactcttatgtggacaatagatataaatcaaaggataaacataatatgatccatccacagctccagagaagtttggtattaaggaagaccctaagagagactcgtggattacccttggagggagaattagatgagatctcctgagaaaatggggatgaggaggatggtaagaggaagatagtggaatgtaaaatgaaattaaaataaataaataaaagacgacatttttattacattaatcctaccaatcaatgggcaagggagatctttccatcttcttatattttctccaattcttttcttcaaagatttgaaaggataacccaaaagcccgtcccttaaaatgagattgatgacttctctttatgccatcctagagccctcacccagtggctgaaggaagcagatacagacatctacagatatacactgagccgaaatccagaatttagttgaagagagggaggaatgaagaacgaaggggtctgtaccaggttggagaaacccacaggaacagttgacctgaacaagggagagtacattgatcccagatgctgtcggggaggccagtacaagactggtccagtcccctgaacatggatgtcaatatggaggcctctgtactccagggagcctctggtggtggattagtatttttccctggtgcaagaagggactttgagagctcatcccacttgaagggtttcactctggccctggacacatggggaaggaaccaggaccagcataggaagacttggtggactttgcagtgcccccgttgagtgtaaatattatattaaaaaggaacccattctgcaatacaaccctactgccatgatgtgctcttaagcatgagacatcatagaaccataggctgcaccctctgtaactctaagataccacagattctaacccagactttacccaggaaaactttgaatcacctaagatggataaaggaagacattccaggataaaacaaaatttaagcactatttatctacaaatcctgccctaagaaggtgttagagggaaaaaaattaacctgaagagacaaactgtacccaagaaaacatatctcagatcagtaaatcaagaaaggggagaaaacacacacacacacacacacacacacacacacacacacacatacacacacaaacaccccaaaattacaagaatcaataaacacttctcatggataactttctataacagtggtctcagtttcccaatgaaaaggcacaaactaagagattagattagaaaacatgatccatccttctcctacatccaagaaatacaccttaatatcaagaacagacaccatctaagggtaaaatggatggaaaaagatattccaatcaaatggacccaaaaacaagccattggtagccactttaatataacacaagtcaaacttcaaaccaaacctaatctgaagagatagggacaactattttatccattgggaataatccaccatgaagatatttcaattccaaatatcttagcaccaaacatgaggacacccaaattcataaaatagactattacaacttaaatcatatattaacccttacacactgatagtgggtgacttcaatattccactctcaccaatggacaggtgacccagacaaaaactaaagagagaaactggaggtaacacacattataaaccaaacagacctaacagatatttacacaacatcaacccaaacacaaaagaatataccttcttctcagcacctcatggaactttctcctctattgatcacatactcaggtacaaagcaagtctcaacagatagaatgaaactaaaataacactctggatcctatttgagcagcacagattaaagctggatataaagaacaagagaaaccgaaagcttacaaaattagagcagggcgatgtggaacaaacagtgctgcgttctggacaacatgacattactgtttcgatcatgaactaatagaaactgtgctcacctgcgtaagactcacacaagtttagtcctgccaaaatgctggcatagctggggaggtgctctctagaccccacttgtaactggagtctctattgacagtggatggttgctgtgggagggacagtcattctgactatgtgactactgtagcttttctatgttccagtggatgcatatatggacaaccctagctggacttagtagatcatcattatcaacaacaagaaagacacagaatttggagaagatgtgttgttggagagacagggagatttgaaatggtgaatgggagcatagacatgatcatggtataagtgtcaaaagtaaagaaaagatttaaaatttttcttataactcctactgtgtcatacatgtttgtagttgatcatgtttctccttccttccttccttttcattatttttttttcctgagacagggtttctctgcatgtccctggctgtcctggaactcattcacttgtagaccaagccagcctgtctctgcatccacagtgctgtgattaaaggcatgtgccactaccacccgttttttctcctttcttaatgtgaagactatacattagactgcttttatgtctcccataacacttaacaaaaaatggtttttggatgcatgatttgagttgagtatagaacagaaggaaagagagcttgatgaaatgataattaataataataataataatagtaaggctatacttataataataataataataatccagtagctgttcaaagcagaaacaggcacccacagctaagcactgaaccatacccctggaatccaattgtggagacggaggagggatgagcaagggagccaagatggtgctgcagaaacagtggacctgaccttgtgagaccatggagacactagtcataatgccacggaaacagcattggactgaaccaagccctcggaatgtgggtgccagctaggaggccaagacagtctgtaggacctctaacagtgcagccagtctttaaccctagagcaataatggactttgggaacccactccctatgaagggatactattgaatcccagatacagcaaggagagcctaggccctccccccaatgatatgacagactttgaaggtccctggtggagggcttcactatccatggtgggaggtgggggatgggttggggagggttgttggggaacatgggtggatggtagggtgagggaaatgtggggatggatatgtaaatatgagtagcaattaaagaattaaaaaataccaaccacagtctcagtgtactaggaaagagatcaacaaaggaactcagagactgaatatatcttatacatcctaaatttatgacaagacaatacataactgtgggtaacatcattacagcatgcagctgtatatatgacaagatagataaatttcttgagcaagcattgagagatgaaacaaatttgatgtagaaatccttttctgttataaacatatttgaaaaattagaagatgattcatacttttaaaaatttagaatggccccactggaccatttattgaagaataaaatgaccctagaagaaatttctttcctcatagagtcataaccagtgaacttctaataagttaactgttttgcttctttcaaaacttgaaatgaaataaccaccattgaatgcagatattgaggggactggtataattatccttacatatcccagggaacattttaaaatcttgataacaaaaagcttacaagaaacaagcaagctattgaaggcaaaaaatcttttgaggccattaacagcaagtaaggcaaggaagagaggaaacataattattacaaatattattttccagttaagtaaacattacataaagagaaatgttaaattcgaaaaatgtcacctgaacatttttgaagtggagactggtctattggtctagggattataaaataatcatagaatcagatcattccgagtgctaatcttaaaccacttcatgaaattgacatgcatgtctttaataactcattttccttttctttatttcatatttattatccctagaatttcataaatgtcataatacacatttagaatcatgatgccttctctttatttctaaaatcattatctcggatattactgcacaatttcaaacatttgagatctgacattgattgataaagttattcataatgcattcctattgccaatttaattacttcggggttaaatgaagaagcattttacatgatatgctttaatatagttcaattattgaaaacaaatcaaacaagtagtacatttcaaaaatgaaagatgataataggacatcttttcagtggaaagctttattttaaaatgcagaatatttataaattaatggcatacaagaagatgaattccttgtcctttctctttaaatatcagcatcatcaaatattaagtgcctgtaaatacctactctaattgatctcatgcatttccttgaccttgatacatagctgactgtgtccctaaagaactaaatacctgttcagaccttctgcttgtctgcctaactgattccttcctgtggctaaattatttcttccccaaaccctattccccctaggatttaacctcttttctccaaagttcatgtatatgtcacagcccatcagattaatgctgtctgcaggacttgtcagtaaaatcagcctgcagtgatggtagtgctgtggctttcagcacagcttcaagcctaatacaagcagctcaagtaaggagatgatgtaagttgaagtttcagggcagtgatgaagaggtctcagaatttaaatagcttctgcaaggcaaattgctctgtgtttcccaggtgattgtaatccttgaaatcaaaccacctctcacagtgcacaatgacatggttatcaaatgttttcaatgatttcttgagcatcagaactgaaaagaatgacaggtttaggtttgttcaaaattcataatattgtcattcagcctcagatctgacttgttcctatcgtttggaatgggcctatacagatggcatccacttgcttgccttttttttttcttcagagagacagctgccctagaattacagcagcgtattttaaaaacaatcatatcctttagaaataaatcctcctctcctgtggggtattgtcctgggaaaacttgatactttaataaaaacaaaaccgaaagaactcaggctcagcaatagcttctatcagttaaatgtttagtgtaggaaagagtttccttaggacactctgtgtttttgataaaattctaaatttattttggtcaaatatttcaagtgagaataaatgaaaaataaggagcaacacaatttttgtttgaaacaggtatcagtcttgctccctggccttgacttcataattcttcaactcatcctcccaactgttggatttacaggcatacaccttcatgcctggctaaataatgagtaattctactctagtatttctccatcaatagaaaagattgcatactgaattctaaatgcaaagaagtatttatttgctccaagcactgcttgctaatcattagtgagaaaaataaattgtacttaagggctaaaaccaattcaaatctttttagaaacttatgactacagctttcgaggatgactcagagggttaaggataatgacctaaatttgatatccagaactcaaataaaggtagaagaagagaatccactcctgaaagctatcctctgactttcatacacacatacaaaacaatgacaaactaaaggactttaccactaaataacaatgccagcaacgattatctgtttccttctttaatgaatgagtacacacagaatctatttttaataaagatttagttttaaagcataaaatggacaactgcatacaaaatacttttttatctttttcaactaacaacacatatggagagcatgtctgtttaaatcagaagtacatatctgctgggcacagtggcacaatcatttgaggcagaggcaggtggatctctgtgagagggcagcctgaactacatagtgagttccagaaacagccaggactatgtagagagaccttggttcaaaaaaatgcttatattatactcacatcagcgtttgaggacgaagtggtagtgtctcttgattgtagacagaggacattaccatgtattagaccatttctcttttacactcttccctgttggggcattgactgaactactacttttctgtttgtggttgaaggttagggttctatgttgtaataaagcactgtaaccaaggcaacatagaatttctttggcctacacacccacatcacagttcatcatctaaggaagtcaggacagggaatctggagacaggagctgatgcagagaccatggagtgatgggggaagtgcttctgtgtatgtgtttgtcttactggatgataaaatactgtctggccaatgaagcagcaagttaggcaggactaggagtcaaagaggattctgggaaatgtagtagagaagtggtgatccaggcaggaagtgacatagcagggagactcatatttaagcaaggagaaacaggaagtgtccctttccccctctgctctttctgcagctgcacaatgtaacccactggcaaggagggataccaatggaagctgtccgataagataagtcttttaaaatatatagatttttgataattaagactgagctagcagatgagagatcctaatcattggccaagcagcatttgtacctaatatgtttctgtattattttgtccatccacgtggcaggcagaactcagtcggctggcagagaccgcccatgtggtggtagaactcgggtggcttttggtagaaagatttatcataacacatggggggggtgctgatttagcttacacatcctggtttacttagtcttccttccttccttcctctctctttccttccttcttccctccctccctccctcctgttttctctctctctctctctctctctctctctctctctctctctctctctctgcttctttagaatgttctctctctctctcttttagacagggcttctctgcatagttctggttgtcctagaatagtctctgtagaccaggctggcttagaactcatggatatctgcctgtttcggcctttccagtgctgagattaaagccctgtgccaccattcatgctatctcagcctgctttcttatagaatccaggtccttcagcccagggatggcaacacccacaatggtctgggcactcacctatcaatcactaataaagaaaatacaccacaggcttagctatagcccagtcttaatggctttttctcaatttaagttccctcctctccagtgactttaggctgtgtcttgttgacataaaactagccagaacaacaggctcttcttcattcacactgtgcttcctgagggtaagaacctgtctctcattttatcaccttcccacataggacaccttaataccttcaggattgcttctccaagacactgaactagggcctataaatagctgatgatttaataatactatcaatagctttgttgaatttactttaatatcctgaatagctcatttaattttgagctaaatgaatatgtgatatatgaacgaatagttttgtattttgttaataatagttatttcattttagttttccataagaaagttttaggaaatagtgcatagaggaatttattatcatctcaccctacagataaggagacaaaaaaaaaatcaggtaattccaatagcactaagatcaacaattaataaatgggaccttatgaaattgaaaatattatgtaagacaaagggcaccatcaataggacaaaacaacagcctacagactgggaaaagtcttcttcaaccccacattcaacagagggctgttttccaaaatatataaagaagtcaagaaactagattatcaacaaaccaaataaattaaaagggggctacagatctaaacagactgctcaacaggagaatctcaaatggcagagtaatacttaattaaggagatgtttaagatccatagccaacagagaaatgtaaatcaaaacaactctgagattccatcttatacctgccagaatgcctaagattagaaacacaagccttgtcgcacctatcttgaccagcaagaaggacacgactacgactcttcttcaagcagtttattcagaaaccttgtacattagcttctccttctacctctacctcagcttctcctcagcttctctttctgcttcttctatatctctcccagtcccctggcaagcccttaaaagcaagctcattacccaattagctcatgccacctggcgatcccggataggtcacagctggaggaggcacaccagatccactaagcgctttcaaataaggcttgtttacagctaagctcggtctccctggcatccagccaggtgccatcttggggctgtggctccccacagttcccccttttttatttaaaaataacacaacaggcaagggtagaggtctgattcttcaaatcaagggactttgtaatgaccccacgcccagttatcatctgagctggtgccacacctgtccggtatcttttctcagagatgcatataccaacccatatgcaatcagacatgcccttcatgaagccgcagaacgctgacttcaagtgcagtacttcgtcttgcagcctgagtgggatgactgcttagcactttagtactgttagccaagcctgaggtgactgccctgccttcagggcttcgaaggcttgtgcaatcatggcattacttctcctctgtgacaccctcatcctgcagatacaccataaggctatgaaactaactaggataagcattcctcccagggcacccattcccgcccactctttcagatgatttatggcttgagtgatccacacagacagcccctccacaaccgagatgtagaccctggtggaattcacgtgcactatggagagtctcagctcctgcatcagcttttcaaaatccctagacaagttgcctagaagatactatgaaggttgtttagacatgtttgctgctaaggaataattctgataggacacaactgttacacacaaaccaggcattctccattcacatcccaactgtgccaattgccataaagtatccatttgttcctgtactagatcaatgcgttgattcaaaaccataatgccacctttcaattgagcattaaggtctccctggcatccagccaggcaccatcttggggctgtggctccccacaacaagcaataactcaagctagagtgggaattagtttgctagaggcttcatctagcaactgatggaaacagaagcagagacccccccagcccaacattaagtagagttcagggaatcttgcagaatagggggaggaaagattgtaggagccagaggggtcaagagcaccacaagaaaactcacagtatcaagtaacctgggctcataggtgctcacagagactgaactgatgaccatggcactgacctaggccctctgtgcatatgttacagttgtgcagcttgttcctcttgtgggatatgtgggagttttgggactcctaacagtgggaacaggtgctgtctctgactttttacaggcttttgggatcctactccaccaactagtcttcttgctcagccttaatacatgggaggtgcttagtcttactgcaacttgatatgccatgtttttgctgattcccatgagagacttgccctttcctaaacagaaatggaaggggagtggtttgggggggagactggcaggagaggaaggaggggaaactgtggcagggatgtaaaaataaatacagatatttattttttaagaaaaagatttagggtgattaatttaccgtaatttttgttattaaaacttcaagatgtttccttaaagatcaggcagggctgctcacctatcacaatgtgcacacacttgcgaccagaccttgagagctgaatgtagtggtgttgcccaacgctgtgattccagcactcaggagtgtgtggccagccagaatgccacagaaagaccctgagaaggttgaggtgttgagagttagctcgtttctcatttgtgatcccacttgtaacagaacataaaataaaattgaaataatcgtactttttctactggatatttgagtggggtctgtgtgtgtgggggggtgtaatattctttttattactttatagatgtaagggcaggttattcacatattgtttatatagtgcctgatgcttggtaatttcttttatacatctttgtgatggactaattgacataaacatgacccaatacttgattgtataacctgaagccaggacttctttttcacttgaaggtggaagaatacttcttataatttcccaaacaagttgaaatggcagggtgatcctaacatgaatatttcagagttgaaaaactttgacatcgaagttgttgacaaattaatgtcagaatattctcgggaaaaaataccttagttcatgatacggttgagtggaactctgagtagtttcagaaaagctaagtttgtgaagctatcataaaataactttttcatttattgttgaaggactgtaaagtatacttttcctgaagtagtccaggctttgctccatgtgcccttgtaattgttttccaataatgcagtagtctgatgctgtcattttaagtggacatcctctctaagcaaatcttaagtagctgttcctgtgtttgaaaaaccccagatattggtacttgctgctcccttttcattgattggaaaatctcttagcaggtcacagtgttttatgtcttacaataatcaaagtacttttgggtcattgccaacatgagggagaaaaaagaaattggagtgatgtctctacaaaatcagtcagctttagtctgaggctgtagttcagttgtacttgctcatctttcccacagctctctgttcaagtacctgatatagagaatagtaattttccattaaaggagtaccatttggtccctaatattgaatacaggtaaagttatcgttttccttctcttttctgtcctttactgctttcctcaatcgtcccacccctacttatttgccctttttattatttggaaggaaaagttacaagccaaagtcagtctttgtttttgaggtgaagtcttacaatacaacttggtctgttctcaaattcatgaccctcctgcctaacaccttcctggtactggaatctgtgtgtgagccaccatgcacagactccaaaatcacttttcaaacaaacatttccaggtcttttctgggaagtctgtatttgcctaaagggtaagaggctctctgagattttcactcaccatcggtggtcaaacttgtgcctgattattgctggaggggaatagtttgttgggatccttaccagggaagttggggtttgactgtttcaaagagagtatatgttggagaatcatcatgtgcattccttgaggtaaaaatcctggaggtattaaagaaaacggtactgaaaggcaggcctgtcacctacctcctgaaactgattgtagtgcctagcagagatgcagaattcaccagcctcactgaatagcagatgaaacagtaatgagagtggctgtaagagactgcctcctctctcccttctcctgtgactcagtaacctgggcaattccttcctgttagggaagaaagctgtagtaacagctaatagtgaatgcctaatcaggtaggaactaagagggttccaaaccaagactagtgctttttacaaatcaaaaagggggaaatatgatattttatgcctccaggcaaattagaaccaacatattttaaagtgtaagaagtacacttaaaatatggacgaatatgttcaacttctgggaagtaggatggaggccaaaacactttcactatttatttaaagtgtgtgggatgactgagggaagagggagtaactatttccttttaaaagtaagtgcaagtcaatttgggttgaccagaggatcttcagatgtgtcagtctccatgatcacatgtactaaccttaacactgttctatattcctaaaacaattttaaggcccctaagctctagatgcagacatagttttgcaggagtgttacatgtagtataattattttatgctattaagtaagatgcaattatatgaccagttaattggtcattgtctaatgaactcactttttgcttgttttaaatatttttattttgaaacaaccttttctcattttatataatccctcccatcctcctatttcccccaacctttccccaccctaccccccatctactcctcaaaaagggtaaggtttcccatggggagtcaacaaagtctggcacatcgctttgaggcaggaccaaaaccctcttccctgtatctaggctgagcaaggtatccctccatagggaatgggctgcaaaaaaacagtttatgcactggtgctactaccagcggccccacagactattcaagccacactaatgccacccacattcagaaggcctagtttggtcctatgaaggttcccccactgtcagtcagagtcagtgagctcccactagctcagctcagctgtttctgtgggtatcctcaaaatggtcttgacccctttgctcatattatggctcctccttctctttgactggactctgggagcttgatctagtacttagttgtggaactctgaatctgcttccatcagatgctggatgaaggttctatgatgacaattaaggtagtcatcaatctgattacaggggaagtacagttcaggcaccctctccactaatgcttagggtcttagctggggtcatccttagggattcctgggaatttccctagtgccaggtttcttgctaaccccataatggctcactctatcaagatatctcttttcttgctctccttctctgttcttcccccatttcgaccatcctgttacctcatgatgaactcacttttaaagtatctacttcttaatgttatcatattcatgattaagttttcaactatggacattaggggacatgtttagactacagcagaatgtaaggacatggtaactgctatatggctttaatgagcactagccacttttgtgttcatgggccctttcttgactgaaaaatattaacaatttgtattgtgactgtgtcaatatagataacataattgagtctggctcatatttactttttatattttaaaaggaattatgtattaaatattatgaaccctaaattcttgctgagattaagctctggagttactgtgacttaaggaaaaaaatccgcagttttttttttttttcagaaaaagactgtctgtcttgttcacaacagtatacccaatgccagttgtcaaataggtagctaataaatagttctcaaaaaagaattcaaaagtaagtatttctaaatattaggaatacatgaagacttcaaatagttttttttgttccataaaatattgcaagttgggctgaccgcttggctagaagaccagagtttgattcccagcatccacactgcagctcacaaatatctgcgactccagttccagggtatccaaagccctcttatggaatccatgaacattgcacaccatgtggttgacccataaaaataaagctctagatatacaaaatttaaaaaaaatatttcaaattctctgatattttgaatatgcaccacatttgattcatatctataaaggacctagagaacagcgtaattgtagtcacaagcaataacctagtaaattcttcaaaaagctaaaagaacacatgatctagatcaacagatgatgaccgaatctaccactcctgggtattaacacaaaggactccaagtctgcgtatcatagagataccagagcatcaatatttattacagcaccattcacatagctaagatatagaacctgctagatttccatcaatagatgaattgac

(The sequence listing continues in the following parts.)

1-77. (canceled)

78. A targeted integration (TI) host cell comprising an exogenous nucleotide sequence integrated at an integration site within a specific locus of the genome of the host cell, wherein the locus is at least about 90% homologous to a sequence selected from: contig NW_006874047.1 (SEQ ID NO: 8); contig NW_006884592.1 (SEQ ID NO: 9), contig NW_006881296.1 (SEQ ID NO: 10), contig NW_003616412.1 (SEQ ID NO: 11), contig NW 003615063.1 (SEQ ID NO: 12), contig NW_006882936.1 (SEQ ID NO: 13), and contig NW_003615411.1 (SEQ ID NO: 14).

79. The TI host cell of claim 78, wherein the nucleotide sequence immediately 5′ of the integrated exogenous nucleotide sequence is selected from the group consisting of:
(a) sequences at least about 90% homologous to nucleotides 41190-45269 of NW_006874047.1 (SEQ ID NO: 8), nucleotides 63590-207911 of NW_006884592.1 (SEQ ID NO: 9), nucleotides 253831-491909 of NW 006881296.1 (SEQ ID NO: 10), nucleotides 69303-79768 of NW 003616412.1 (SEQ ID NO: 11), nucleotides 293481-315265 of NW_003615063.1 (SEQ ID NO: 12), nucleotides 2650443-2662054 of NW_006882936.1 (SEQ ID NO: 13), and nucleotides 82214-97705 of NW 003615411.1 (SEQ ID NO: 14); or
(b) sequences within 3,000 base pairs from nucleotide 45269 of NW 006874047.1 (SEQ ID NO: 8), nucleotide 207911 of NW 006884592.1 (SEQ ID NO: 9), nucleotide 491909 of NW 006881296.1 (SEQ ID NO: 10), nucleotide 79768 of NW 003616412.1 (SEQ ID NO: 11), nucleotide 315265 of NW 003615063.1 (SEQ ID NO: 12), nucleotide 2662054 of NW_006882936.1 (SEQ ID NO: 13), and nucleotide 97705 of NW 003615411.1 (SEQ ID NO: 14).

80. The TI host cell of claim 79, wherein the nucleotide sequence immediately 5′ of the integrated exogenous nucleotide sequence is within 2,000 base pairs from nucleotide 45269 of NW 006874047.1 (SEQ ID NO: 8), nucleotide 207911 of NW 006884592.1 (SEQ ID NO: 9), nucleotide 491909 of NW 006881296.1 (SEQ ID NO: 10), nucleotide 79768 of NW_003616412.1 (SEQ ID NO: 11), nucleotide 315265 of NW_003615063.1 (SEQ ID NO: 12), nucleotide 2662054 of NW_006882936.1 (SEQ ID NO: 13), or nucleotide 97705 of NW 003615411.1 (SEQ ID NO: 14).

81. The TI host cell of claim 78, wherein the nucleotide sequence immediately 3′ of the integrated exogenous nucleotide sequence is selected from the group consisting of:
(a) sequences at least about 90% homologous to nucleotides 45270-45490 of NW_006874047.1 (SEQ ID NO: 8), nucleotides 207912-792374 of NW 006884592.1 (SEQ ID NO: 9), nucleotides 491910-667813 of NW 006881296.1 (SEQ ID NO: 10), nucleotides 79769-100059 of NW 003616412.1 (SEQ ID NO: 11), nucleotides 315266-362442 of NW_003615063.1 (SEQ ID NO: 12), nucleotides 2662055-2701768 of NW_006882936.1 (SEQ ID NO: 13), and nucleotides 97706-105117 of NW 003615411.1 (SEQ ID NO: 14); or
(b) sequences within 3,000 base pairs from nucleotide 45270 of NW_006874047.1 (SEQ ID NO: 8), nucleotide 207912 of NW 006884592.1 (SEQ ID NO: 9), nucleotide 491910 of NW 006881296.1 (SEQ ID NO: 10), nucleotide 79769 of NW_003616412.1 (SEQ ID NO: 11), nucleotide 315266 of NW_003615063.1 (SEQ ID NO: 12), nucleotide 2662055 of NW_006882936.1 (SEQ ID NO: 13), and nucleotide 97706 of NW_003615411.1 (SEQ ID NO: 14).

82. The TI host cell of claim 81, wherein the nucleotide sequence immediately 3′ of the integrated exogenous nucleotide sequence is within 2,000 base pairs from nucleotide 45270 of NW 006874047.1 (SEQ ID NO: 8), nucleotide 207912 of NW_006884592.1 (SEQ ID NO: 9), nucleotide 491910 of NW 006881296.1 (SEQ ID NO: 10), nucleotide 79769 of NW_003616412.1 (SEQ ID NO: 11), nucleotide 315266 of NW_003615063.1 (SEQ ID NO: 12), nucleotide 2662055 of NW_006882936.1 (SEQ ID NO: 13), or nucleotide 97706 of NW 003615411.1 (SEQ ID NO: 14).

83. A method of preparing a TI host cell expressing a polypeptide of interest comprising:
a) providing a TI host cell comprising an exogenous nucleotide sequence integrated at a site within a locus of the genome of the TI host cell, wherein the locus is at least about 90% homologous to a sequence selected from contig NW_006874047.1 (SEQ ID NO: 8), contig NW 006884592.1 (SEQ ID NO: 9), contig NW_006881296.1 (SEQ ID NO: 10), contig NW_003616412.1 (SEQ ID NO: 11), contig NW 003615063.1 (SEQ ID NO: 12), contig NW_006882936.1 (SEQ ID NO: 13), and contig NW_003615411.1 (SEQ ID NO: 14), wherein the exogenous nucleotide sequence comprises two RRSs, flanking at least one first selection marker;
b) introducing into the cell provided in a) a vector comprising two RRSs matching the two RRSs on the integrated exogenous nucleotide sequence and flanking at least one exogenous SOI and at least one second selection marker;
c) introducing a recombinase or a nucleic acid encoding a recombinase, wherein the recombinase recognizes the RRSs; and
d) selecting for TI cells expressing the second selection marker to thereby isolate a TI host cell expressing the polypeptide.

84. The method of claim 83, wherein the nucleotide sequence immediately 5′ of the integrated exogenous nucleotide sequence is within 3,000 base pairs from nucleotide 45269 of NW 006874047.1 (SEQ ID NO: 8), nucleotide 207911 of NW_006884592.1 (SEQ ID NO: 9), nucleotide 491909 of NW_006881296.1 (SEQ ID NO: 10), nucleotide 79768 of NW 003616412.1 (SEQ ID NO: 11), nucleotide 315265 of NW_003615063.1 (SEQ ID NO: 12), nucleotide 2662054 of NW_006882936.1 (SEQ ID NO: 13), or nucleotide 97705 of NW 003615411.1 (SEQ ID NO: 14).

85. The method of claim 83, wherein the nucleotide sequence immediately 3′ of the integrated exogenous nucleotide sequence is within 3,000 base pairs from nucleotide 45270 of NW 006874047.1 (SEQ ID NO: 8), nucleotide 207912 of NW 006884592.1 (SEQ ID NO: 9), nucleotide 491910 of NW 006881296.1 (SEQ ID NO: 10), nucleotide 79769 of NW 003616412.1 (SEQ ID NO: 11), nucleotide 315266 of NW 003615063.1 (SEQ ID NO: 12), nucleotide 2662055 of NW_006882936.1 (SEQ ID NO: 13), or nucleotide 97706 of NW 003615411.1 (SEQ ID NO: 14).

86. A method for expressing a polypeptide of interest comprising:
a) providing a TI host cell comprising at least one exogenous SOI each encoding a polypeptide of interest, and at least one selection marker where the at least one exogenous SOI and at least one selection marker are flanked by two RRSs integrated within a locus of the genome of the TI host cell, wherein the locus is at least about 90% homologous to a sequence selected from: contig NW_006874047.1 (SEQ ID NO: 8), contig NW_006884592.1 (SEQ ID NO: 9), contig NW_006881296.1 (SEQ ID NO: 10), contig NW_003616412.1 (SEQ ID NO: 11), contig NW_003615063.1 (SEQ ID NO: 12), contig NW_006882936.1 (SEQ ID NO: 13), and contig NW_003615411.1 (SEQ ID NO: 14); and
b) culturing the cell in a) under conditions suitable for expressing the polypeptide of interest and recovering a polypeptide of interest therefrom.

87. The method of claim 86, wherein the nucleotide sequence immediately 5′ of the integrated exogenous SOI and the at least one selection marker flanked by two RRSs is within 3,000 base pairs from nucleotide 45269 of NW 006874047.1 (SEQ ID NO: 8), nucleotide 207911 of NW 006884592.1 (SEQ ID NO: 9), nucleotide 491909 of NW 006881296.1 (SEQ ID NO: 10), nucleotide 79768 of NW 003616412.1 (SEQ ID NO: 11), nucleotide 315265 of NW_003615063.1 (SEQ ID NO: 12), nucleotide 2662054 of NW 006882936.1 (SEQ ID NO: 13), or nucleotide 97705 of NW 003615411.1 (SEQ ID NO: 14).

88. The method of claim 86, wherein the nucleotide sequence immediately 3′ of the integrated exogenous SOI and the at least one selection marker flanked by two RRSs is within 3,000 base pairs from nucleotide 45270 of NW 006874047.1 (SEQ ID NO: 8), nucleotide 207912 of NW 006884592.1 (SEQ ID NO: 9), nucleotide 491910 of NW 006881296.1 (SEQ ID NO: 10), nucleotide 79769 of NW_003616412.1 (SEQ ID NO: 11), nucleotide 315266 of NW 003615063.1 (SEQ ID NO: 12), nucleotide 2662055 of NW 006882936.1 (SEQ ID NO: 13), or nucleotide 97706 of NW 003615411.1 (SEQ ID NO: 14).

89. A method for expressing two polypeptides of interest comprising:
(a) providing a TI host cell comprising an exogenous nucleotide sequence integrated at a site within a locus of the genome of the host cell, wherein the locus is at least about 90% homologous to a sequence selected from contig NW_006874047.1 (SEQ ID NO: 8), contig NW_006884592.1 (SEQ ID NO: 9), contig NW_006881296.1 (SEQ ID NO: 10), contig NW_003616412.1 (SEQ ID NO: 11), contig NW_003615063.1 (SEQ ID NO: 12), contig NW_006882936.1 (SEQ ID NO: 13), and contig NW_003615411.1 (SEQ ID NO: 14), wherein the exogenous nucleotide sequence comprises a first and a second RRS flanking at least one first selection marker, and a third RRS located between the first and the second RRS, and all the RRSs are heterospecific;
(b) introducing into the cell provided in a) a first vector comprising two RRSs matching the first and the third RRS on the integrated exogenous nucleotide sequence and flanking at least one first exogenous SOI and at least one second selection marker;
(c) introducing into the cell provided in a) a second vector comprising two RRSs matching the second and the third RRS on the integrated exogenous nucleotide sequence and flanking at least one second exogenous SOI;
(d) introducing one or more recombinases, or one or more nucleic acids encoding one or more recombinases, wherein the one or more recombinases recognize the RRSs; and
(e) selecting for TI cells expressing the second selection marker to thereby isolate a TI host cell expressing the first and second polypeptides of interest.

90. The method of claim 89, wherein the nucleotide sequence immediately 5′ of the integrated exogenous nucleotide sequence is within 3,000 base pairs from nucleotide 45269 of NW 006874047.1 (SEQ ID NO: 8), nucleotide 207911 of NW_006884592.1 (SEQ ID NO: 9), nucleotide 491909 of NW 006881296.1 (SEQ ID NO: 10), nucleotide 79768 of NW 003616412.1 (SEQ ID NO: 11), nucleotide 315265 of NW 003615063.1 (SEQ ID NO: 12), nucleotide 2662054 of NW 006882936.1 (SEQ ID NO: 13), and nucleotide 97705 of NW 003615411.1 (SEQ ID NO: 14).

91. The method of claim 89, wherein the nucleotide sequence immediately 3′ of the integrated exogenous nucleotide sequence is within 3,000 base pairs from nucleotide 45270 of NW 006874047.1 (SEQ ID NO: 8), nucleotide 207912 of NW 006884592.1 (SEQ ID NO: 9), nucleotide 491910 of NW_006881296.1 (SEQ ID NO: 10), nucleotide 79769 of NW_003616412.1 (SEQ ID NO: 11), nucleotide 315266 of NW_003615063.1 (SEQ ID NO: 12), nucleotide 2662055 of NW_006882936.1 (SEQ ID NO: 13), or nucleotide 97706 of NW 003615411.1 (SEQ ID NO: 14).

92. A vector comprising two nucleotide sequences at least 50% homologous to:
(a) two reference sequences selected from any portion of contig NW_006874047.1 (SEQ ID NO: 8);
(b) two reference sequences selected from any portion of contig NW_006884592.1 (SEQ ID NO: 9);
(c) two reference sequences selected from any portion of contig NW_006881296.1 (SEQ ID NO: 10);
(d) two reference sequences selected from any portion of contig NW_003616412.1 (SEQ ID NO: 11);
(e) two reference sequences selected from any portion of contig NW_003615063.1 (SEQ ID NO: 12);
(f) two reference sequences selected from any portion of contig NW_006882936.1 (SEQ ID NO: 13); or
(g) two reference sequences selected from any portion of contig NW_003615411.1 (SEQ ID NO: 14),
wherein said sequences flank a DNA cassette, and wherein the DNA cassette comprises at least one selection marker and at least one exogenous SOI flanked by two RRSs.

93. A cell culture comprising a TI host cell comprising at least one exogenous SOI each encoding a polypeptide of interest, and at least one selection marker where the at least one exogenous SOI and at least one selection marker are flanked by two RRSs integrated within a locus of the genome of the TI host cell, wherein the locus is at least about 90% homologous to a sequence selected from: contig NW_006874047.1 (SEQ ID NO: 8), contig NW_006884592.1 (SEQ ID NO: 9), contig NW_006881296.1 (SEQ ID NO: 10), contig NW_003616412.1 (SEQ ID NO: 11), contig NW_003615063.1 (SEQ ID NO: 12), contig NW_006882936.1 (SEQ ID NO: 13), and contig NW_003615411.1 (SEQ ID NO: 14).

94. The cell culture of claim 93, wherein the nucleotide sequence immediately 5′ of the integrated exogenous SOI and the at least one selection marker flanked by two RRSs is within 3,000 base pairs from nucleotide 45269 of NW 006874047.1 (SEQ ID NO: 8), nucleotide 207911 of NW 006884592.1 (SEQ ID NO: 9), nucleotide 491909 of NW 006881296.1 (SEQ ID NO: 10), nucleotide 79768 of NW 003616412.1 (SEQ ID NO: 11), nucleotide 315265 of NW_003615063.1 (SEQ ID NO: 12), nucleotide 2662054 of NW 006882936.1 (SEQ ID NO: 13), or nucleotide 97705 of NW 003615411.1 (SEQ ID NO: 14).

95. The cell culture of claim 93, wherein the nucleotide sequence immediately 3′ of the integrated exogenous SOI and the at least one selection marker flanked by two RRSs is within 3,000 base pairs from nucleotide 45270 of NW 006874047.1 (SEQ ID NO: 8), nucleotide 207912 of NW 006884592.1 (SEQ ID NO: 9), nucleotide 491910 of NW 006881296.1 (SEQ ID NO: 10), nucleotide 79769 of NW_003616412.1 (SEQ ID NO: 11), nucleotide 315266 of NW 003615063.1 (SEQ ID NO: 12), nucleotide 2662055 of NW 006882936.1 (SEQ ID NO: 13), or nucleotide 97706 of NW 003615411.1 (SEQ ID NO: 14).

96. A process for producing a polypeptide of interest by mammalian cell culture comprising the steps of;
(a) culturing a mammalian TI host cell comprising at least one exogenous SOI each encoding a polypeptide of interest, and at least one selection marker where the at least one exogenous SOI and at least one selection marker are flanked by two RRSs integrated within a locus of the genome of the TI host cell, wherein the locus is at least about 90% homologous to a sequence selected from: contig NW_006874047.1 (SEQ ID NO: 8), contig NW_006884592.1 (SEQ ID NO: 9), contig NW_006881296.1 (SEQ ID NO: 10), contig NW_003616412.1 (SEQ ID NO: 11), contig NW_003615063.1 (SEQ ID NO: 12), contig NW_006882936.1 (SEQ ID NO: 13), and contig NW_003615411.1 (SEQ ID NO: 14); and
(b) recovering the polypeptide of interest so produced.

97. The process of claim 96, wherein the nucleotide sequence immediately 5′ of the integrated exogenous SOI and the at least one selection marker flanked by two RRSs is within 3,000 base pairs from nucleotide 45269 of NW 006874047.1 (SEQ ID NO: 8), nucleotide 207911 of NW 006884592.1 (SEQ ID NO: 9), nucleotide 491909 of NW 006881296.1 (SEQ ID NO: 10), nucleotide 79768 of NW 003616412.1 (SEQ ID NO: 11), nucleotide 315265 of NW_003615063.1 (SEQ ID NO: 12), nucleotide 2662054 of NW 006882936.1 (SEQ ID NO: 13), or nucleotide 97705 of NW 003615411.1 (SEQ ID NO: 14).

98. The process of claim 96, wherein the nucleotide sequence immediately 3′ of the integrated exogenous SOI and the at least one selection marker flanked by two RRSs is within 3,000 base pairs from nucleotide 45270 of NW 006874047.1 (SEQ ID NO: 8), nucleotide 207912 of NW 006884592.1 (SEQ ID NO: 9), nucleotide 491910 of NW 006881296.1 (SEQ ID NO: 10), nucleotide 79769 of NW_003616412.1 (SEQ ID NO: 11), nucleotide 315266 of NW 003615063.1 (SEQ ID NO: 12), nucleotide 2662055 of NW 006882936.1 (SEQ ID NO: 13), or nucleotide 97706 of NW 003615411.1 (SEQ ID NO: 14).
